United States Patent Application Publication US 2026/0258423 A1 - sequence listing, part 45

SEQ ID NO: 301568 - DNA, 83257441 bp, Homo sapiens (residues 12,808,843-14,943,649 of 83,257,441)
  source 1..83257441: mol_type = genomic DNA
aggctgcaaattttctgaacttttatgctctgcttctcttttaaacgtaagtttcaattccaaaccatgtctttgtgaatacataaaactgaatgcttttaacagcacccaggttacctcttgaatgctttgctgcttagaaatttattctgtcagatgcactaaatcatctctatcaagtttaaagtttcacagatctctagggcaggggcaaaatgctatgagtctctttgctaaaacacagcacgagtcacctttattccagttcccaacaggttcttcatctccatctgagatgaacagcatttggtcaaagccattcaacaagtctctaggaagttccaaactttcccacatctttctgtcctcttctgagtcctccagactgttccagttctgcctgttacccagttccaaagtcacttccacattttcaggtatctttacagcagagccccactcccggtaccaatttactatattaatctgttctcacactgctaataaagacatacccaaaggaaagaggtttaattgactcacagttccacatgactggggaggcctcacaatcattgtggaaggtaaaggagaagcaaaagcgtgtcttacacggcagcagacaagagagcttgtgcagggaactcccctttataaaataatttcttcagacctcatgaaacttattcactatgacaagaacaacatgggaaagacctgccccatgattcaattacctcccatcaggtttctcccttgacacttgggaattatgggagctacaatccaagatgagatttgggtggggacacagccaaaccatatcaggggagaagactggtgccagagtgactaggtaggatgtgatacactcaaccaggagactaattacgcagtcaaagtgagataatggtcatctagatcagatttgtggccatgaggaaaggagccatggaagggtttcagagataaaggccatggtggaacttgcgggagcagtgggagataaagctgctgctggggttggtgcttgggcaaagggtgcttgtgccagtcactgagaaggagcctgtgagaaatgcaaggagagaaacccaacaggcaggtgggatgaggggctggagcctgggagggagatctaggggatggtggtgaggaatcatcagcaggggggtggaactgaagcatttaatcagggcagtgctgagcagagaggagggctgaggaatggcctgtggggcattagaaagtactagatgttgtggaagtaaagggaaaatactggtagctcccatttagcttagagtgtcacccataagggaaatccttgtttgacccactgtgttagtttcccagagctgccataacaaatcaccacaaactgggtggcttaaaacaaacagaagtttattcttgcacagttctgcaggatataagtttgaaatcaaggtgtcaccaaggctgtgctctctgaagaatctaggggagaatctcttccatgctggtttaggataaggaatatcttatcttggttcccagtttctggcacaaagcttcaaacatctttggaatatcttcagtgataggagtctctttattatgctaatatggtgactcataatggggcgatagaaagcttgaggatgagggctggtcaccagaaaggacaaccatgtgacaaatgggttagaactttgagtcaccccaacttctggggaggggagaagtggagatcgagctcagtcctgtggccactgacttaatcaatcatgcatatgggatgagatctctggacattgaagctcagtagggctttccagttggtgagagcacattgatgtgctaggagggtgatgcacctgcaattccacgaggaatcccctgctctccaccccagacctttccctgtctatgtatctctttcacttggttgtttctcacttgtatcatatacagttgacccttgaacaaggagggatttagggagaccaaccccttgtgcagtcgaaaatccaggtgtaacttttgaccaccccaaaacttaactaccaatagcctccggttgactggaagtgttaccataacacaaacaatcagttagcacatattttatatattgtatgtattatatactgtatttttacaataaagtaatctagaggaaagaaaatgtgattaagaaaatcatggccgggtgcggtggctcaagcctgtaatcccagcactttaggaggctgagacgggcggatcacgaggtcaggagatcgagaccatcctggctaacacggtgaaaccccatctctactaaaaatacaaaaaaattagccaggcgtggtggcgggcgcctgtagtcccagctacttgggaggctgaggcaggagaatggtgtgagcctgggaggcggagcttgcagtgagccgagatcgcaccactgcactccagcctgggtgacagagtgagactccttctcaaaaaaaaaaaaaaaaatcgtaagaaagagaaaatgtatttaccattcactaagtggaagtggatcatcgttaaggtcttcatcctggtcttcacattgagtaggctgagagggagaaggaagaggatgggttggtcttgctgtctcaagggtggcagaggcagaagaggtgtggaggtggaagaggaggcaggacaggcaggcatatttggtgtaacttttattggaaaaagtctgtgtataagtggacctgcacagttccagcctgtgttgttcaaaggccaactgtatatacgtctgaaatggggcagttttgtgaaatattctttccttgttgggtctgtattaagtctaggtaattagtgtcagcattgagttgaattttaggacacccagttgatgtcagagaacagtattggaacaggcatacctttcttttagtttccggtgtcagcagcaatccttagttttgtttggcttataggcacattcctccagtatctgcccctgtcatcatgcgtgttctccctctgtatctctgcgtcccttctcctcctcttaaaagggcatatattggattaagggtctaccctacttccactacaaccttctcttaactaattatatctgtgataacaatgctgtttccaactgtattcacattctcaggttcctgtggtcaggacaccataacttctgggggacacaattgaacccacagggcccacgaagcacacatttctcattcaacaaagagtatttttttctgcctgctttgtgccaaggtcaggggtggggaacatgaggcaaacaaacatgagtaagtctaataatcttaccctcgaggggcttatattccagtaggaaaaataagatttataaacacactgctgatatttgaggctggtttttacttatgccctaagatagtatgagatgctagaataattgggaggccagaaatatcacgtatggcttgagtaatcagccagaattcaaggaacaaaaggtgatttcggttggacttcggaaggacgcatgggatttcgacagatggagatgagggaaaaatacaagggaagatttaagctagcaaagtacactaaagcaaaggggacatgcaaatctaagacctggatctagatgtgtatagaatttactcctcgaaacattactaacgcattaaatagattgtgagacatctatagatgaattttacctgaatcagatccaaatgcagcaatatgcagccacctccaagacacgctgacaggggaacagagcaagatgctcaacatgttatatgtatttgacctaatttctgtaaagagaaataatttctgtatggtggataaataggttcacaaacacacgtggttaacatgctcacaagtgcatagaagatctctggaagaatataaaaagttgtgaacagtgcttctcaactggggaacagggaagagaagcagactgcatttcttactgaatgcatgagctactttcaactctttttttaaacaagctactctttgaactgaccttactttggcattttgaaataccttatttcccttaacaacttaaaaaatcacagtcatatggtgttctataaaagtctctacttatctggagtattgcctttattgatccacccactcagcaatggcaggtcccatgcacacatgcaagggccttggagtaattggaccttggtttactcagctccattacttctcactgttggccaatgctgcagtcaggccagtctccttagagctgctttgcaccgtcctgcccacgctatgttttatgttttgaatttgctttgcatgttctgtttctaatctcctgccctgggtgggagtggaagagggtgaggagagtcgggaaggaaattgaacggttttctcacaacagtctgaccctatcagtcaaccacgattcaagaatatttacactttaagatatgtgaaaagttaaaggaggttttttgttttttttttttagaaagataaagagcaaatcaaaagtaaaaataaggagacagcaggagataagaaggaagagagaaaaacaagaggagtacctcagtggaggagtgtgccagatagacatgaaaagttaaaaccactaacagtgtttgttatatgtaatgtagggtgcaatatatgtatgcttgtctgtatgcacataaacatgcatatatatgcatacaaatacatacatttctatctgcatatgagcttccttgtctttcactgtgacttctattcaagtaaagaattaatctgtatctgctccaggtacagaaaagttacaaaaaaccagcttgagagatggatgctcagtaacaggaatggatgtgtgacttggcacgtcccccaccacacaaagagagtgtatctttcagattctgatacactctccttgggtggtgggaggcatgtttatgtgcatatatacaaggatacatatattgcaccccacatcacatataaccatgtgggcaaattattcccaggctgctgcaggctggcatttctcctggctcacggtgagtaccagtgtggaactgggacacacgtagtccaactgtctgccgtcgtgactcattgcccccttcgacctcaccttcttggtgttatatttcgagatttcatctaaatattcagaagggcaatctcttcctttccttcggggttatcgattatgttttatcttcttagtgctgaccaaaagcttaattgtctacagcggtgtttatcaggctttcttaattcatctccctttttgataagcctgaaatgtgtatgctcttctctttggggtttttcagactctgatacactctccttgggtggtggggggcctgccaggtcacacacccttccctgttactgtgcagccacctcccaaactggtgtttttttttttttttttttttttgagatggagtcttgcactttcacccaggctggagtgcagtggcgtgatctcggctcactgcaccctccgcctcctgagttcaagcaattctcctgcctcagcctcccgagtagctgggattacaggcgcctgccaccacacccggctaatttttgtatttttagtagagacggggtttcaccatgttggccaggctggtctcgaactcctgacctcaggtgatctgcccgcctcggcctcccgaagtgctgggattacatgggtgagccaccgcatctggccccaagcttgtttgtgtaacttttctgtacccggagcagatatagattaattctttacttgaatagaggccaccgtgaaagacaagcaagttcatatattgatgggaatatatgtttatatgcatatatgcaagcatacctatattgcaccctcatattacatatagcaaatgctgttagtggttttaatttttcacgtctacctggcacactcctccactgggtgtactcctcttgttttcctctcttccttcttatctcctgctccctccttatttttacttttgatttatctttctgaaaaaaaccccaaaaaacccccaaaaaagcaaaaaccctcctttacttttcacacatcttaaagtggtaaatattgctgaatcatggttgactgatagggtcagattgttgtgaggaaactgttcagttttcttcccgactctcctcaccttctcccacccctacccagggcattagaaaccctggtttgattttccttgaacctcccccaccacctgcttttacttctcctctctcctggctttagagaagtgaggacaaaaggactctgctgcaggttgttcttttgattttttttttttaaaagattcttgtcctggctttcctgattctccagagtctcctgggattttgtagaacaaaatagaagagggaggagaagcagggttcccctaaaggttatcctgtaggcatttagaatgtacaatctcatacacggctgtctactgtatttccttgcaaacattccgcctcgcacttattctgtgagggaaataagcagtttccccacatagccaataaaagtgtattgtgttcaatactaggagaaatacagaaatagccttggtggggtagaaaaggctggaagcgtgaataatagaatatagcacataacaaagaggtaaagactaaaagatcagaaaggattttgagtgggagaatgttatgatccctgaggaaaatgatagatttttaaactattatgaaattagagcccccatgactccattttacaggagagtataccagtcaggagaagataagaaattggctccaaatcaaagcaagtaagtggcagactagaacctagtggaatccaggaactgcccaggtcccaaattggccgttgggtggtatgtacataggtcagataccaacaacatgacaagaattgaaaactctctttcctctccttttattgcttgagaagcttcatgggggaggtggaacttgaaagtgagccgttaagaatagttcagagttaaataaggagatgagcaggcagtctgtaggaagagaaccaagtacagagagttgggaatagatgttgtgtttcacagtcactggacagatggaactatttagaaggaagtgggtattgtggaggttggtggaaggtcaaatgctggggagactgggcttttagtggggctgtggaagctgagcacagtagttgagatatggtctgtgaggcagtgggagttactgaacgcagttgaaaggggaagtgagattataggcatggttgatttggaacagtaccttagttgcagtatgcagggtggattgaaaaaggggagcctgccatgaaggaagccaacaaagaaaatgtcaagtagaaggcagatctgtttgagcctcttggtttttaggcatatttgggtggtgagaaatggttttctctgctcctcagcactcttcttttattcatcttgaagctataaacttgagcaaagaaggtgaccttctccagttgagaaggtataaaactaaccatacacacccctgctaaaactgccacacaagcttttaggacaaaatcagtggacacttaaattaatttgagtggaatatgatgaggaattatattagggtagggaaagtcataaatcttaaatatgataaaaaggatgaaaattggaaaggagctttaagctgtcattattttcagatatgattgtttatgtaaactaaaaaattactgcaaatgaataattagaattattaagagtttagcaagcttgctcaattcaaaagaaaggtggggtgtatttattaatatatcagatacagtggacttcaaggaaaattacagagataaaggaagacattacatactgataaaagagtcagtttaccagaaagacaaaataattctacgtgtgtatgcatctgagaatagaggctcaaaatacatgaagaaaaaagtgatagaaccaaaaggacaagtagacaaatccacagttataggtgaggactttgacactcctgtcttagttattgatagaattagttcacagaaaattagcaaggacatagaagaactgaacaacactgtaaaccaactggatctaattggcatttatagaatacttcactcaacaataagatatacagaggatacatattcttttctagtgctcgtgaaacattcaccaaggttgactatatcctcatccataaagtaaatttttaactgattttaaaatgtgaaaccatacagagtatgttctctgaccataatggagttcaactagaaatctgtaacagaaagataactaggaaaccccaaatgtctggtaatatagttaagtaaataatccataggtgaaaagaggaaatttcatgggaaattaaaaagtatttagaactgaatgaaaatgaaaacacaacatatcaaaatttgtggggtgcatctaatgattggagggaatgtaatagcattaaatgcttaattagaaaagaggaatggataccccatttaccctgtgattattatgcattgcacgcctgtgtcaataaacctcatgtagcacataagtatatatacctactatatacccacaaaaattaagaagtaaaagaagaatggtctcaaatcagtaatataaggttctaccttaagaaaatagaaaaggaggaacaaaataaaccccaaatcaggcagaatgaaagaagtaataaagagatgagtagaaatcactgaaatagaaaacagaaaaaaattagaataaatgaaaacaaaagctgatgttttgaaaagatcgataaagttgatctggccagaccgactaaggaaaaatgtaagtgaaaacacaaattactaatatcaggaataaacaacgggatatcactgcagacctggaaagttgtttaaaggattaaaaagtatcacacaccattttgcacataaattggacaatttgagtaaaatataccaactccttgaaaaccgcaaattactgaaattcaccaaagaagaaataatgtatcttgaaaagtggagataattggaatacttttattactataaatagagttctttttgaaaacaaaactctgggaccaggtattttcactgacagttgtaccaaacatttgagggaataacacagtctctttcagaaaacagaaggagagagaacacttcatatctattttgtgaggtctttattacactgatagtaaaatcaaagatattacagaaaaagagaattatagacgaacagtcctcatgaacacagatgtaaaaaatcttcacaaatcaaatgcagcaatatgtaaaaaatataaaacattatgaccaagtgaggtttatttaccccagtaatgtatggttgggccaacattcacaaatcactgtaatttctcattttaaatgactcaactggtacagccaaagcaaatgacaaaattcaaaatccattcatgataagacattttaccaaactagaattattaggaattttaaactggtaaggtgcatctggaaaagaaaaaaaaaaaaaaaaaacaaccctacaactcacatcatatttaatggtagaagagtgaacgcttttcccctaagactgaaattgaggcagggatgttcgctttcatttcttctacttaaccttgtagtggtgatcctaatcagtgcaataaggcaagaaaaataaataaaagacatacatattgaaaaagaataaataaaactgccactatttgtagacgatgtgatcacctatgtataaaatactgagaactctatgaaaaatctcctagaactaataacaatttatgaaagtctcaagacacagaaacgtctaaacgccacttatatttctgtatacctgcagtgaacaatttagaaaacagtatttagagaagtagcaaaattatgtgcaggatccatgtgccaaaggctataaaacactgttgaaagacattttaaaagacttttaagtgcagacatagcatattcgagattgttggattcaatctgtttatgatgtcatttctccccatattgatctataggtttcgtgcaattcccatcagaatttcagcagcgtatttttgtagatacagacaagccgactctaaaatttgcatggataggcaaaggaactagagtagccaagacaatctagaaagaagaacagagttggaaggatcacactatccaattttaattacagtaaagctactatgaacaaggcagtgtggtattgataaagacatgtacatttagatccaactcagcagactagagagtccaaaatgaaacctacacaaatacgatcaattgattttgaacaaagatgccagggcaattaatggagaatggatctcacataaattagatcatatggcatgtgttcttttgtgcctgacttctttctcaatgtattatttttgagattcatacgtgttgcatatatcagtatttttttttggtctttttaagtattttgttgctcaaatatgccataatttgtttatccattcacctattggtggacatttgaattatttccagtttttggcttttttgagaaacatatgctatcaacattatggaacaaatctctttgtgaattgtgtttttgtttctttggataagtacctgggagtaaaattgatggatcaattttgtaagaaatcaccaaacagtttcccaaggtatttatatcatctgtactcccaccagttatgtccagttgctccatacccttgtcagtatttgatactgtcaagtttttttttttttttaatttttgccacttcagtagctgtgttgtagtagtttatcatggctttaatttgtacttccttaacaggtaatgatgtgaaacaccttttcatgagtttattggacattcaggtgtctccttttgtgaaatcctgttcaatcctttgcttatgccaaaaatggattcttcatctcttctgttttgatttgtaggagttctttatctattttgcatgtaagtcatttgctgattgtgttattaccaatgctgccccctcattgttgcttgccttttcgttttcttgatgtctttatgaacagagtttttaattttgaccaagttcaagttatcatcatttcttttatggttaatagtttttgtgtcctattgaagaaatcattgcctatgccatagaaggagatattctgcattttcatttggaggctttattagtttacatttagatccgtaatccagttcaaataagtatttgagtgtgttgtaacataggagttaatttcattttttttccagttgaatatccaatttatccagcagcatttattccccattgtattgcagttgactctgtcacaaatcagttgatagtatagtatatttaggtctgtttctggactgtatttgtagtttattcatctttaaaattttttctgaattgataaataataattgtacatattcatggggtacgttgtgatgttttgatacatataatacccatattttaaatgttttaaatattattttgtaactactcaggatttaataacacaatttttaaaacttcaactaaaaaagtgaaaaagaaaaaaaattaccagttatgataggtggagagtattaaattccaggtttaagtaaaattaaggttaagatgtatttctaggtcatgacctggaaaatggagttgataagctgttgtggtgtctgtactgtgttcctggcactatcgtgggaatacaaaaatgaagaagatggatcttgtccttgaggaacatgtgggtgagtgagagatagaccatatagtaagtctgtgttccctcaacaccacatggataccttcactgaggccctacagtgtgttgaatcatgtgattgaaggtttctcaagaagacatggctaccaaacaggcagatttaaaagacagaccttggaaaagaagattgaatgatagagattttatgttatcccagtgtgattttatgttattccagtgtgatagttatagaagacctgagaatatgtgagtctcggaagaacaacctttgtttctttcacttgttcgggcaggcagaggctttgaagaccatatctaaaaccctgaagaatggatagatgtctcctggctttttggaagagaaagaagttataaaggttttaactgtagttaactgccctaatctttatgcttttccaaatatgcccattagattttagtttggcatatgggaagatatttggcactgatgacaatctcactgatttggcgaatttatcatctatttgaacaaacagctaagtcagaagaggtgacattatagactagcagaaggcactggccaaatctgactgaaatcaaaacaggacagttgtgcaactcagcaaggattaaagacaaaaacaaaaacgtgggcatggggatgagtaagggatgtgttgtcttcaggtgtttccatttacctggttatcaattgatagaaaacaatgttatcagtaaaactgaagttttgagattagattattgtggtttttgtttataacctgggtcagaaggttattcacaaaataaaaaagttctaaatgtgccttgggccttggaatttgcatggcttcatatatgcagctctttcagctgtgatatccttaaggcaaacaagagtcattttattatacattgcacaatgttagaaaaccagtcttgttactgtatgagttacagaagttggacagacagcataggtggggcagatagctttccctggcctaccgtgagctagagagccattgcagtgcctgagcattaatctcaaactttgatcctaaaacaccaactagagaaaatagaaaagcaaaaaatcaaaacagagcattatgtttctttcttccaaaaggaagcagagcgttatgttcctttccttttggatgttttccaaacaatgtgaatcacggtttttaaaatctttactttcacaatgttgcttattaaaaaaacaacatctcagctttgtattatagatcaaccgacttcctatagggaaaggtaagtagtctagttattgctttgattttgattggcatctcctaggattattctgacactaccattagaagatttatacactactttaccaacttacatataaagacctatagtcctagtgttggatgggcttgggatttcattagctctaggtgccaattctagttgattgatactttgttgaggcactaacttaaaagtattgagagtctgagcctggatttggtcaaggagggctacaatatataaagggttggcaaactttcctgtacagggccaggcagtaaatattttaggctttgtgggaaactactctgctattatagtgaataaacagtcatagacaatatataaatgactgagcattgctgtgttctagtagatcgagttataatcatggatatttgaatttcatgtaattttcatttgtcacagaatatttttccagtcatttggaaatgtaaaaattattcttgtggaccataaaaatccagatgatgggcagaatttggtgtgtaggttatagtttgctgccccctgcaatggattgtcactggttgcccttggcttgggaggaagagtgatagcattcctgctctttttctgggttaaagctctgatacctcagggagttcaatgccaagaggtctatgaagcataagtaaggccatactctatttaataaagcattactgttaattatttatggaaagaaaccaagtctagaatgcaagccattggcaaaccaggatagaattgtttcatcactttaggccttgagtggaagtgatgagagctcaacagaaacaattatgcagccacagagcaaggaagaacatatgttcaatagtgaaatgttggttctcctggctgccctccttgcctggctactccactgtcctccccttcccaatgcacatgtctgactctgaggctggacttaggtaattcagtgtgaagtctgtaaaaggggcagttgatcttaaagcctaaaagaagtgttgcacagcttgcgttctgttcaagtatccagatggtggtggtcctaggcagagctctctccttgtctactgcactgtgaagatagattttgctttctttctatcttctttcatctgcagaggcccgtaactcagaaatcggcctgggtaaaatgtgcaacttcgtgtcgactctgtaatatagggtatattgtatctggcaatccctcttgacagcagatgccatagcagcttgttttttgggaggacatgattgtccttatgataaaatgaatcttcagagtctcagtttcccttaatacttctaatcaacttggtaaccatcaaactctcttgaaatacttcccgtgatgtttctgcctgcagctgagttggaggaggtgactctaacgcaggttggtaccactgtgacttcttgaccactcaacttaagtgagccccaattcttgcctcacatccttttgtcagatcagcttgttcttcattctccagaacgatagtatttctttccttttttactttcctcaaacttctccagtcctttctcttatggccaacctcactttctccttcctagagaaaattgaagctctgtcagatggatggaacgatcttaactttttgctaagaagttaagactcactatttctattaccatctctctcctctgccccacctgttctaatagagaagctattctttctctatccttccatctggttctcatcttttcccaaactttgctgtgttatattatcaagtatctcttctctctcgtatattcaactgatctctcaaatagtttcctccatcaacatttgaacatgtttgatttcttccatctcaacagcagaagatctcttgatacttctccttaactccatctagctttcctcccttctatgttgccagacttttggaaagacttgtctgtattcactgtctccatttctttgtctcacattcatggtatatattaccctatctggcttctgaccctgttgctctaccaaaccactctgcccaacctcagtaaagtatcaaagtcaccgaactccatcttgctgaatccagtggtacatcctgtgagtctttcttatttgaccttttaacagaatttggcattgtggatcactttttcttgaactgcctttgtcttccccttggcttgaatgataccacattcttctgggtttcttcttgtttctctggccactccttattggtctccagtgcaggaaataatggatttcctcgtggatcactctacagtgtctccctgtgcaattttcttcatgcccttggcttcagggaccattctgtgtggatgactctcaaacttaattctcctgagccttctttgagctgcacatggtcaatccacagggcctaaaacaccatggaaaagagtttgaattttgagcagaggagtgatatgattttgcttacatttttgaaaagatcactcttcctgctgggtgcagagtaaacaatggagaggcaaaagtggaagcagggaaacctcttaggaggttaatgtccaggaaagaagttctaggggctgggtctagggtgttgtatccagctggatgttcaaaatgacctcacactccccatgtcatgacctaattcatgatttctgccagacttcctgttgtcacctgccccatctgattgagttggaaacctcgaccctactttctttttctaattcatcatttgatactctggccctcttccactttgcttctaacacagtagccagagttgtcttcaatacaagtctgatgccatccccaggataataattattttcggtgtttcccatcactcagaggaaaaagactagaaaatctgaatatgtccatctaaggttctacacagcctggccttaatgtacctcgctagcctcccctcgtacgtccttccttttgcttctgcacttctctaccttctgcttgtgttgttctctgccactctgaccacttttatctactcatttcctagtcttccagaattctgactgaagtatcacttttggggaagattttccgtagtgcttgactaccccagtttaggtcaaattctcttattttatgttcttgtggaactggatttctttccttttgtaggcttatcttagtttctaactacatgctcatttatatgattatttgattactatcttttttgagatggtgtctcactctgtcacccaggctggagttcagtggcatgatcacagctctctatagccttgacctccctaggctaaagtgatcctcctacttcagcctcccgagtaactgggactacaggcacatgctaccatgcccagctaaattttgtattattttgtagagatggggttttgtcatgttgcccaggctggtctcgatctcctggactcaagccatcttcccaccttggcctcccaaagtgctgggattacagcatgagccactgctcccagcccttgattactaattttttaaaatgacatgagggactgtattagggttctttagagaaacagaaccaataaggagtgtgtttgtgtgtgtgtgtgtgtgtgtgtgcattatagagagagagagattgattgattttaaggagttggctcatgtggttgtggggattgttaagcttgaaatctgccgggcgagtggcaggctggagacccaagggagagttgacgttgctgtctcaaatctgaagtctctttttctgggggacctcagtcttttctcttagggtttccaactgatttgatgaggcccacccacattattgagggtaatcaagttactcaaagtctactgatttaaatgttacttacatctaaaaaataattcacagtgagatctagactggtattttaccagttactgggtactatagctagccaagttgacacaaaaaaattaaacatcacagggaccatgtctgtgttagcccattattatatcctcagtgtctgccacaatgtatgacatgtagaaggcagtcagtaaacattgattgtatggatttgagagcgttaactttctactttccacctgtagccaatgccagtgagtgttgtacatttcatggctataaggactgttctttggagtagtcctttgtgttcgttctaaaatattttgttgataaacagttttgtgatttaagagagatctctaatttttgacaagtttgggtttttttaaaaaataattttaaacttttaagtcaggggtacgtgtacaggtttgtttgttacataggtaaacttgtgtcctggggtggtttgtacagattattttatcacttagctattaagcccagtactcgttaggtatttttcttgatcctctccatcctcccacccttcactctctgattggccccagtgtgtgttgatcccctctatgtgtccatgtgttctcaccagacaaatttgttttcttgtaattcatttatagaccctcttagcctgtttctttgcagactcttttattctcatcccataaaaaagccttgtcagccatttgacttaaccattggattggctcttttcttacattcctcttgtgtatttttcctgtattttcttggatgcagtagccagagccaactttgttttcagtgtaattggaccatgactttatttaaggagataattgcatttttatttcctaatgctcttcaattttattggccattttggcgacagcagcacattgtgttgaatattctatttctaaaaccaaacttctcatcctggccctgtgtccagagttgtctatttctgtcactggtgccagacaccaagacaagaatgcttggatttatccttaacttttcccaccctcaccattcctagtctgttacaagattctcttgattcttcttatgattcttcaacattgatcctttttatttgtccatttcttacaacaagcctttatgggctcatgccagataactgatttcttcttggtgtctttacgactgttccctcccagcttcaagtttttgtagccagcaacctcagatgaatcttcctaagcatcagcttgagtgtgctttcttctccctacctcccaatacccaatcaccaccttaagcttctccctacctcccaatacctaatcaccaccaaagcttaagtttgattaagattcaaacttgatttccttttcctactggaccttcagtacagaggattaagttaattttacttctcaggccatgacatactatcatttttggtctctgtaaccctgttctcttatttatttaattcctttattctcttttagtgacaatttgaatatattgttttttgtctgtgttcttataaaatatgtattgttgttttggttattttaatttatatgacttgtactctagatctcattttattttgttttatatatttcactgcttttcacatccttctgtgatgccatgtaaacatgcagtctaatgcgtctaattgctgtttctctttttattcacatcattataaggatgataagaaaataaagttataagtcaattttttatgaatgtcaaataaaaaaatccaaaataaaatattagctaaacaaacccaactttatatttttaaaatatatcacaattaagtagtatttatttccagtaatgcccacataataatataatgatggaatagtaatatattcaatataacaataacctttcaattttatttacttcatgtatatctatgtatgtttattagaatttaatactttactccctagaggtctaatgtactggttaggttaatttttctatatttcatggtttatattgccattatgaatgatatacagttatgctatattttatagttgggtttgactgctggagagtcatgagattgatttttaaaaaaattagtaacaaccttgatgaagtctcttactgccaagatgggtggatctcttgaggtcaggagttcaagaccagcctggccaacatggtgaaaccccatctctactaaaaatacgaaaatcagccaggtgtggtggtgcacgcctgtagtcccagctactcaggaggctgaggcaggagaatcacttgaacctgggaggtggaggttgcagagctgagatcgtgccactgctctccagcctgggtgactggccatctcaaaaaaaaaaaaaaaaaaaaaagtctaatagttacttatctattaacattttaaaatattacattgaatcatatggcaatgctgatatttgaccgtatttttgcctataatgtctgtaattttaaatatttcaacctaatagatgattatattgtctacaaataatggtagtttttttctctttctttataccttatattttttgtttccctagatttttcagaacttctagactgtgttaagtagcactgataatgaatatcctacagttttcctgttaaccacatttcttctaggttttgggttcatgtagagatactttatcaagcctaagaaaatccttcttatcccagtttgcaatgaggtattttcatttttttcctaatcacaatagaagttgaattatagcaaatgctctttctgcatccattgagataatcatgtaggttttcttttttatatatacatgaagtaaatgaaattgataggctgttacattgaatcatctgggcattactgggatatgtactacttaattatgatatattttaaaaatataaagttgggtttgtttagctaatattttcttttggatttttttttctttcttttttttttttttttttttttaaagacagagtctctctctgtcactcaggctgcagtgcagtggcgccatcttggctcactgcaagctccacctcccgggttcatgccattctcctgcctcagcctgctgagtagctgggactacaggcgtccgccaccatgcccggctaattttttgtatttttagtggagacggggtttcactgtgttagccaggatggtctcgatctcctgacctcgtgatccgcccacctcggcctcccaaagtgctgggattacagggattacaggcatgagccactgagcctggcctttattttggatttttatatcacattcataaaaattgacctataactttatttttttacaatccttatatggcttaggaatcaagattgcaaagtttagttgcattaaacaagtcacgcaactttcatttctatcttctggaacaatttgtataaggtagggattaactcctattgaaaggtagaactcaccttaaaactattgtgtcttggggggtccaaactacctgttcttcctaaccttaactgtgttcctatatcaccctcttacctaattgagctggtccgtcattcctatttctatttcagcatgtttctgcttgctgttctacttgatgtaacaactttcctttcctctgtttgtctaaaccttaccatttaaggccagggtgcagcccaaatcactcttgaaaccctttctgatgccctgggccttcagcagccctcctatttttggcttcttatagtatatattgtctctttcactcttttgacccttggcatgagcaacactgcataaatatttatccccatattagtatatatctgggacctctctgcacctcctcatttaaacctggattttaagtctcaattgtacatagaacccagcctctcttggaagttctatttgttagtggtgatcatttgattatatcacactcagctttgatcaacctgacctgttcgtattgacataatcacaccaacatattccaccttaaggctttttcactactcttttcttcttttgcatcatacctgcatgcatgattcctagttttattgagtctctgctcaaatgtcattttcttcatgtggccttccttgaccactctatttaaaatcgtagtcctactgccccacattcatgatccaacccccatcctctgctttattttaattatattttgttgtttattttctttctctgcctattgtaatacaaggtcatcagggtcagagattttaatctgcattgtttactgatgtatcttggtacctacaagagtgcctgggacctatttaatactcagtaaatattagaataaatgaatgaaaccaaatatgttagccttcagttaagaacttgtcctgcaatttagtcctcctaccactaagcaacagcaaaggagaactggttatttaagtcctggggttttgggattgcaaggggattgaagcctttttagtaaatatttattcaaatgcttccccatctttgccaaaaagaactatgagtctttttcctatgattgctaaattatcttaagccaaagaactcatttttttcttttaagatgctccgttgagaaaattatctttttgggtacttttggataatttttggataattgctctttggggctagttgtaagagaggtctttttttttcttcctggttctttgactactcttggggtctgcctccagtcctgtccctcttacagtaagatgtggctgggaggagagtattgattcctcagattgttacatcttcacttctcagattgttttaaattcagtgtctcatggctcaaacttcttatcataggagatatttcctaagtcgctcttatgctctcctttacctggtaatatgaggaatcaggaagatgtggtgggattagtttctaggtccagtctagtcaccatttgccttgcgaccttaggcaagtcattttatcctggagagttaagacctcccccactgtaaaatgagggaatcagattaggtgccctgtaaggtctttttttccagcagctaaacaaaaaccgaagaaatatgttattattttttttccttttgatagggagctattcctgacagctctcatctggtgttttgcttaatttacacacaatgattaatttacacacaagcttagcttgtatcccttagcaacacttagcaactgcctgctttcagaaagtagttcagttaaggttgtttaaagggacattatcccatatatcaaagcagaagtgaaaataaagttgactttgtctggggacacgtccccttctgactttgcagtaatttttctttattacattttcctgttcggtttttgtccacttgcacagtttttatgaaccctaacagaagtttattctggctcgctttcaaaggaattaagtattgagtgtttactatgctccagaacatggtcctaagttcatgccataccttatctcattgaattcttcaacaactcttgtgaggtcaggagggtggttaccttttacagattcaagaaaacatcttaagcctgcacagctagtcagtgaagagtccagcagtgagacttggctgccggactccagacaccatgctgttcacctgtgctgtgctttctcctgttattttaccaaaatctcctgtttacctctgtcaacaaccagcaaagccggacgcttgttaaagtggtaggggcagtttaatgggtaacatactatggcagtagggaggatgtttcagcatgaactggactcagcttcgtttgtacagaggttactggtgctttaaagggagaataggggaatgagcagaggctccgtagagtcagggaagtgaaaaaaattacaaaggcttggtcagtgtagatgctgattagaccaactgtgtctgtttgctggcaatgatccaagaagtcaggattcaaccctcccatcgaggccctgttctttctgatgagtgcatttcagagggatggatagctttcaggtccttgagaaagacactcctgaattgtaggagatgtatatgcatctcacagggacacaggaaggattcaccattgtaagccctttttactaaagagtgtaagaaacaatggtcaggggcctacagtcagatgttggctagaaaaacagtaaattcttttgagtgttctcaggcaagcatgttaacaggaggtagagtcattctagggatgagaccgtgacctgttagaaactgttaatgtttgttaaatctaacaaactcagagaggagtttggatgatgccatttgtgttgagagtctttagttcttataggccaagactgaagcctaggccagaagagtgctctgattgtaactgcccagtaggttctctttgcccactgcccagaaagagccaatttaccaagacaggggaacttcagtagagaaagagtttaattcctgcagagccagctgaatgggagactggagttttattattactcaaatcagtctcttcaaaatttattcagagactggggtttttaaaggataatttgatggatagggggccagggagtcaggagtgttgattggtcaggtcagagatgaaataataggggattgaagctgtcctcttgcaccaagttgtttcctggattggggacacaaggccagatgagccaatttattgatctgggtggtgccagctgatccactgagtgcagggtctgaaaaataccttaaacaccaatcttaggttttataatactagtattatctgtaggagcaactggggagagtagtgatcctgtggcctcttagcttcatgactcctgagccataacttctaaccttctggctaatttgttagttttacaaaggcagtctggtccctaggcaagaaggggctttgttttaggaaagggctgttctcatctttgtttcaaagttaaactttaaactaaattcctcccacagttagttcagcctatgcccaggaatgaacaagagtcaacttggaggttagaagcaagatgaagttggttaggtcagatgtcttttattgccataattttctctattataatttttgcaaagtcagtttcaaaaggagcctagctagagtttggtcaaggagaaaatctttgtcactgctcttgtttgtaaaagggaaacattggaagtctgtaaagatcattctggattgtccatggttggtttctggagttaattttgttccagctcataaaatcacagatctcccttgttctgctagaagcccaacctggcatggcctaaccttttccttccccgacgatagctattctctgtttcactcatgagcatcacagtttctgtgcctgggcacagtactatttgagagctcccctgtgtccctgctccattcccaggctctggcaaagctagggagactatcctagctagaacagcttagggtagtcttcgttctgtttctctgttttgtcggagagggcagtgccactggataggagtaaagtttggggaagaaaggggaccaagtaagaattactgagcatgactctgagtatccttgaatagtgtcctgtgtctgtgtaaggctttagcactgcatatgtgtttcatattgatggactttttcgtacgtgtctgtctgtattcatcatagtcctgatgacataataacccccattttatggttgggaagctgatacccaactagcttaaagtcggtgcctccctgactctcttgactcttttccgtgtgttttgtttttgttttttcctttcgtactttatagaattcacatttccccaaggatgtttctgtgatgcttgatgggccccttggattaccacctggtcctgctcttcctcttctttcagttttcactttttctaaccccttggtgatgaaatgagtcacactctataaaatatttgaagagatttattctgagtgaaatatgagtgatgcagccctcaggagatcctgagaatgtgtccctaaggtgatcaggccacaacttggttttatacattttagggagacataaggcatcaatcaacacatgtaaggtatacattggtctggtctggaaaggtgggacatctggaagcaggcgcttccacgccataggtggattcagagattttctgattggtaactgtttgaaaaagttcttatcaataggaaaaaatgtctgggttaatgtaaggggttgtggagaccaaggttttatcatgcgggtgaaacctccagggtagcaggcttcagagagaatagattgtgaatttttttttttttttcagacttaaagaggctgttctatcagtagcgccaaaagggaggagggtataataaggcatgtccagctcccccttcccatcagggcctgatttagttttccaggttaaggttggaatgcccttggccaagagtacgggtccaattagatggttgggggtgcttcagaattttatttttggtttatgcgttgctttttagaattttaagcattttaactctcaggagctgctcctctctcccctctccaccgtccactcttcttgctcctggctctaagccgccaagtccttgcatttatttcattcttgagtcttcttccatatgtctaactgacaatatgctccttactctgctaaaagtatacattgggtttacattctctgcataaggaatatatctgttatgaattttttaaatattggaaagctagccataacactcaacattttaacatttagtgacactaaaatccagcagtgagctatgatggcatcactgcattccagcctgggcaacagagcaagaccctgtctcaaagaagaaaaatcctgcacaaaaataaataaacaaaaattgtgtatgttgcttattcattctactagtaagtgtttgttatatcttccacactgtgttggcagtggggataaaacatagttccgttactaaaatgtactcttggataaaacaacataaaccaaaaacatacacaaacaaagtcccttcccccatgaagtttattttctagtaatagtgatgttctcagaagaggcataatattagggtgttggagaataaggttaagaaatcagtgggaaatagaaaatttggataaacaacacattttttgttttctttatgatgctagcatctccttattattaataatgtaaatacatgatatataattttgttttatcctataattatatctaccatgttagattataaaagtacagcttactctaatcattgcaagtttaattgcctgtaattattttgagtttttggttgctaaggagactgaaagggaaacttgctatgagggttgtaaaggtctgaaaaaccaaatgcatttttaattcatccgaataatcttgcattagagaaatagagattgtgtgtgatgtcgagaaagaacatcccatagaaacccttttggctgcagggcctggccttttgacaaatttaatttagaatgttcgtatcaaatcttggggaaaggttttcaactaaggtgtaaatgatcaaatggtgtcagttagtgtgaattttaattgaaataatccagttgagttgaggcttgccaacaccctcaagaataagaaaaacgtgtgcacagatgtgtgcagatgtgtatgtaggtacttttttagtcatgttcaaacaagatgactaataagaaatatcaggttctgggcattgataaaaggcagaagagataaatcaataccgtaggcatgatgataaaagttggtaaataaaaaggagaaaattagactcctcagttgctgtttgtcttctgagaacagtaatcttctgacttaaaaagataaaatgagtatttgtgatttggagttaatactcagatttcataagaaagcattatcgtgtttttaccgtggttacgtggcatggtcacaattgctggtaattttatttaattaaaaaaaattgtgaaaaacatatgacatacaatttaccatcttaaccatttttaagtgtacagttcaatcttgttaagtatattcacattgttgtgtgatagatctccagaactttttcatcttgcaacactggaactcggcactcattaaacaataacttcccatttttctctccctccaggcgccagtaatcactattttactttctgtctctgtgaatttgactactttagttaccccatatagttggaatcatacaatatttgcctttttgtgtctggcgtatcatttcatttagcataatatcctcaagttttatctatgttgtagcatgtggcaggatttccttctttgtaaaggcggaatagtattccattgtatgtatatccacattttgtttctccatccatgtacatttgggttgcttccatcttttgtctattgtgaataatgctgctatgaatatgggtgtgcaaatctctcttccagatcctgctttaaattcttttagaattatatattcccagaagtgggaatgactggcaacttaagaacttgtagataaggacagaaatgcttgaagagcagaacggagcaaagttatgccaatcttttttaaaaaaagagtttagcaagtgtgctcaattcaaaagaaaggtggagtgtatttattaatatatcagatacagtggactccagaccaaggaaaattacagagataaagagagacatggctgcatgcggtggctcatacctgtaatcccagcactttgggaggctgaggcgggcggatcacctgatgtcaggagttcgataccatcctggccaacatggcggaacactgtctctactaaaaatacaaaaattggccgggcatggtggcacatgcctgtaatcccagctactcgggaggctgaggcaggacaattgcttgaacccaggagacagagattgcactgagctgagatcaccgagatcacgccactgcactccagcctgggtgacagagtgagactctgtctcaaaaaaagaaaagaaaaaaaagaaagacactacacactaataaaagactcagtttatcagaaacacacaataatcctatgtgtctacgcacctgagaacagaggctcaaaatacatgaagaaaaaagtgatagaactgaaggatcaggcagaaaaatccatagttataggtgaggacttcaccactgctctcttagttattgatagaatcagttcacagaaaattagcaaggacaaaggagaactgaacaatgctgtaaaccaattggatctaattggcaattatagaatacttcactcaacaataaggtatacagaggatacatattcttttctagtgctcataaaacattcaccaaggttgaccatattctcagtcattttaacagatttacaaatttgaaatgatacaaagtgtgctctctgactctaatggagatcaactagaaatctgtaacagaaagataactaggaaacactaaaggttaagtaatataagtaaataatccataggtcaaagaggaaattttatgggaaattaaaaacatgttttgaactgaatgaaaatgaaaatacaatgtatcaaaatttgtggggtacagctaatgttggagggaattgaatagcattaaattcttacattagaaaagaagaatgggtaccccatttaccctaatgtgattattacacattgtatgcctgtatgagaacatcttatgtaacccataagtatatgcacttgctatgtacccacaaaaaaaagcaaaagaaaagagggttgatttttaacatatagttgattggcatgctggactcaaatcccaagcaagatgctaggacaaatgactaatgagttgacctgaggaaatttaggaaaggaagcagtggtcactaggaattagcctgagaggagtaagagtaagtcatggggagggtaactgcatgttgtttttttttttttaaatcaggccactaaacccatagatcagggcaggtagtagaactggtgaatgcgcaaggctttgacgagggttaacaatgactttctgggagatacatggagaagtgtgggaggtatcatggggatgtatcattagaatgagtgaacctgggtaaataacgttattatacattgggggctcctttctgggtaggggtgggaaatggtttatgatattgtgctaggtgggccctgccttgtttactgatggtttgagtaataatcagcattataatctcatatttgaagatgatcaatgtgctccattgagaacccatcctttgacttctccagcatcctccctctcatggacccctccgctttcccatcaccctgtgctgcctgcatttggctgctcttagccagtttccctcccctcccatctctctttgataatagataaccagtgggttactttactattgttcatttcttcatcgttgtaaatatttaaataacattttacaaaaacaatttggtcattttatacatcttatttaagagtaattgctaacactatccttgtcactaaaaatggtgtgtttacagaatttcccaagacctgaaacgatttgtttcccagaaaatatagtaagaaaaaaaagtaggatacatatacatttacatttgtgtatgttcacatatttacagttttgttaaaaatgcctatgtttgcctataaaatatcaaaaagaaaacacatacaaaagttgggaaaggttttgactatttcagatgttttttctttagtaatttcctgcattttccaaatggtcaactttcttttgccagtacccgtattagcctctgactgactgattttccacactagaaatcagtggctccaactttaaaaagtgccctagtgctcaccattttaaagtgaatcggtcttaagtgcggtggcagtggagggaatcaggggtgacgttgacttgctggaaaattccctctgaatttgtagtttgagtgcaggaagatttgaaaaccttattcaccccccacccatctccaattttgtttatttattttgagagggagtttcactcttgctgccccagattggagtgcagtggagcgaccttggcttacagcaaactccgcctcctgggttcaagcgattctcctgcctcagtcttccgagtagctgggattacagacacccaccaccatgcgtggctaatttttgtgtgtgtatgtgtgtgtatatatatgtatatatatatatttaaatagagatggggtttcaccatgttggccaggctagtctggaactcctgaccccaggtgatctgcccacctcagcctcacagagtgctgggattacagacgtgaggcactgtgcccggcccaattttaaaaactggttttatttataccaagtttgttacctgatttcatgtccaccaaaccctctttgtgtcctctgagaattttacttactggagtaacagcaggaaaaagatccactgctagactgtttattcaaagttaaaactggcacacaagtgaaaggaagattggccatttgtcatggtctgttcccagagtatcttatttcttcccaggggtttatctttagaaggtgataatcttcctatcttaacatcaaggactgtgggcctgcccctttgaggtatgtgtcccttagtgtccctcgctcttccaagggaaacttctttaacctgggccttgctatctcctcggtcaccctgtgggtcctttaccatatcctgtgagctttattagtagaaatgaactctaatttgtttaaaatgatctcttcttgaattactacaaacggcagttcattcttaagaaaacactgtaccgtagtgtagtacattctttaaactgatgagacttggtctcagataccttttatgatttccacgtctgaacttgctgggaattatttgtagattcttggctggattatattctgcttcagagttttgcaaaccagatgagtggaaatctgcaaagatttagtagaggtatttcaccaatgaccctaggcttcgagtgcttttgttgttgttgttaaaatgtgaagaattcagtactttaagttgcgtggatattcatttttactgtcctttaggctcctcttctcttttcacattatacctcatcttcatgtggatcatatttattttcaaatacagttaagggattaacccaggaataaaacaagtcaagcactgatacttacaggaaaatcgtgttagttttgttctgccacccaaagactgacctaaaaagagaaagaaataaccgccattcacacttagttattttctcagttgtataaatttcagatacagcccccttcagctctcagcacatccctcaacctttattgtttttttagtgaaacaccagtgtacattttacctattgccatttgctgtggatatatgtattaacacttgatttcttaattaattctttatggtttagattttcagcagagatttttttttgtgtgtcatcagggagtttaataataaatatatttaattctagatccccattattatgtattgatctgttttaataacctctgtgcaatctgatgcaaatatccctccattgtttcagtctggaagcatgtatgtggttagtttattgaggtcaaaacatccttaggactatgcttctggcttggtcataatgcttctgccatgtcttggttgtactgtaatcttagatttaaaaggaatgacatattagtacccaggatgctgacctagggagccacagtcaaataagccactcttgtttgccactagttggccattctcctcatctcatcagtcttttagttgctttctttgtcccccaattccttgggattcaacttgtatcctaggtcacctctccctcttctaataggagcacccaatgtctggcctgggagagcaaagtagggtgactgaggagaggtattgggatggttcatctgggctgaggaggtagagaagaggtgcagttcctgggggagcagcttagggctcccactcatcatcaccacgagggggcctgcaggtttcacctgctcaaggtgccccatgtaaagagcggagattcatgtcatagacataaattaacctgagacggcacaagtagacaagcaaattctggtgtcctggttgaggatcttgaagctgcaggagagaaccccagctccacaaaccccactgatgaccgcgatgtgaacacaccatcctgtttgtgcacagtggtaccctgacctgacccagctcaggagttcttaggggtcggttccccatcctgcaggactctgaccttggcctggtaccctcatagtgtgtgtgtgggtgattaacgtgcaccgtcttccgtgcccgagggacgtctgagcaggtgaaagcagcaaggatgggaaagcccctccaggtggaactcttcacactgtgcaaatatataataaccttagaagagttttacttgaggaaggcgccttttccagtttgcacagaggcacatcctgggccaacagcaacctgtacacaggaaagcacaacttggtgtaaatatgctatggaggaaattcacctcgagagtgagggcccagaactaggaaatggattaccaatgccttttaagttcttcctcaatacctagtctttggaggggccaggcatggtggctcatgcttgtaattctaacattttgggaggccaaggcaggcagattgcttgagctcaggagtccgagaccagcctgggcaacatagtaaaaccccatctctacaaaaattaggtgtggtggtgtgtgctgtagactcagttacttgggaggctaaggcaggagaattgcttgagagcctgggagccggaagttgagctgagattgaaccactgcactccagcctgggcaacagagtgagaccctgtctctctgtctctctctcacacacacacacacacacacacacacacacacacacacacacacaaacaaacaaacaaaaaccacacaaccaaaacagtctttggagggacacgcaggggctccattcttactttctccacttgtgaccctgggcatgctacttaacctctctgagctacaatttcttcattgttaaaatggagataattgaggcagattcatttgtttgtaggtatgaagcttatgtgatttgggaggccctcttaaaataaaagaatttttaaaaattgttcggggtttgcaaatttttcaggcacatatagttatgcaaacacgttgaaaaagagctttctggtagaaggaatagtatatacaaagccaaggaaattcaaaacagcaataccggtttagggaaaggaaagtaattctgcatgacctctgaggtaaggagaatacagacagcagtgttatgcagccatgaatctcagccttggccgaacatgagaatcgcttggaccccgctcccaaagatttgatgtcattggtctgcgacacacctggccactgggtttaaaaaaaaaaaaaagtctttccagggctgagacaggaggatcacttgaggccaggagtttaagactagcctgagcaacatagtgagaccccatctataaaaaatatatgtatcaaacaattagctggatgtggtggcacacacctgtagtcctagctactcaggaggctaagatggcaggattgcttgagaccaggaggtcgaggctgtggtgagccatgatcatgccactgcactccagcctgggtgacagagcgagaccatctcaaaaaaaaaaaaaaaaaaagaaagaaaaaagaaaagaaaagaaaaaaatcatcccaggttatccaagcatcctgctgaggttgagaaggctgatgtgaaaccgtggttctccaactttcatttgcatcagaaccacctggaggactccacccctagagtttgtgattcagtaggtctggagtgtggcccagtaaattgcattcctaataaatttccaggtgttctaatgctggaggttggggactatactttgagaacaacttgcctagctgctagcatgtgatgttgactaaaccccgactgtgtatcctgaagacagaaaaacagggaaaacccttagaacaggtttagaaaaataattgtcccaagagtagcaggaagtgggaattaatgtgtattaaactgttagcatgtgatggtacagagtcaggtggtatgtggaaatagcccatttaacactctgggtaacacacatcatccctcaagccacgcaggctcctggtcactcctgtcacctctaggtgcagaaggtcagtatattctcctaactccaaggctttgctgaagcggccatccttatatgctgaggctgggagagggtagttttctattaatcccattcatatagctctcctctctgaccttagcccccacattgtcagcaacggcctatggtggaagccttgtgtaaataaatgctgtgcctgtgacagagaacatccaaatgtcccttctgccctattattgcagctgcttaagagaggttatgctggcagttggctggccttaaggcgtcctgaactctttctaatgctaaaccttctccctgcctccctctgtttctccccccacctccccatctcaggaaaccatctgtacctagctaccttaattgacctcagtggatctcaccacggttctcttcagatctatggtatcatctgccataggccctgttgtctgttgagagttgctatctgttcattcattgtaagcatttttttttccctttgtatctttaagcatggttttagacagctgccctaaaattcttatctgctgattttggcacctcgttcatcttttggttgatctcaattgattaacttttctcttgatttgcatcgtgttttcctgtttcttatgtctagtaattttggtttatatcctgactgttgggaatgacccattctagaaactgtggatgctattacattctcccataagtattggttactttttttttttttttttttttttgagatggagtttcgtctgtcacccaggctggagtgcaatggcgtgatctctgctcactgcaaccaccaccacccaggttcaagtgattctcccggctcagcctcccaagtagctgggattacaggcacgtgccaccatgcctggctaatttttgtgtttttagtagattcgggggtttcaccgtgttggccaggatgctctcaatctcttgacctcaagtgatccacccaccttgaccttccaaagtactgggattacaggcatgagccaccatgcctggcctactttttgttttagtagtaagtcttgactgagctcaaactcaaaactctgtcttccctcagtgggtagcagctgaaaatttctgtttagttttttagccttacgtggactctttggagtctgctctgtgcatgcatagttcaggagtcagcaagaaatctggaaagtttacgtgtagattgggggccgctatgccgtagagctcactcatctttttctcttaggctgttttctgttgctgtgacagaataccagagaccgggtaacttataaagaacagatgattatttggctcgtgtttctggaggctggcaagtctgagagcctggcaccagcttcagtgagagccttcttgctgcatcataacatggcggaaggggaagtaagcacatgagacacaggcaccaggggctgcactcacaatatagcaacagactcttgtgataactaacctgctaccgcaataacaacgttaattcgttcacgagaactctgccctcatgacccagtcacctcttactaggccccacctttcaacactgttgtcttggggattaagtttccaatgcattaactatgggggacacattcaaatcatagcactcacctttcagcttctagggtagcttcaaactctgttctctggttctttaagacagtaacactgatgatacatacatactaagttttagctccccttcatggtgtagaatatgtcttgtccttaagcaaaaagctggataatgaaaaactcactcattttcattttcttcttccaagtgttgaatttttcatgtttttatttatttttatttttatttatttattttttgcctgcatttgtatattctccaatgtctgcaagcagttttttgtgtatttgggccaggctttatggttatctgtcgaagattggtctgataagagatactatgctgttatcggaagcagaactgacgtgtacttttatagcatttgccaagaatcaaacaaaactaaattgatggccacatttgccgagagttaggctcagatttagtcccttcattctagtctgactctgtcatcagtattgggagcctctgttcaattctgaatcttggagggtttatagaagattgccaactaaagaaaccttcctgaacaccctcctattccccatcctccacttctctgagttactctatcctatgacctagtgttctggtcttcatagtatttgtcactttatgacattctgtgtgttcatttactttaaaaaaaatcatctcggctgggtgcggtggctcacgtttataatcccagcactttgggaggctgaggtgggtggatcacaagatcaagagatcgagaccagcctggccaacatggtgaaaccccatctctactaaaaatacaaaaattagctgggagtggtggcaggtgcctgtaatctcagctactcgggaggctgaggcaggagaattgcttgaaatcgggaggcggaggttgcagtgagccgagatcgcgccattgcactccagcctggtgacaaagcaagactccgtctcaaaaaaaaaaaaaaaacaaaaaaacaactctttctttcttttagaacctaaacccataaagacaaggaccttatctgtcttgcttctcattttattctctgtacctgtaaatctttgcgcatagtaggctcttggtttctattaactaaattggttcatgcttcatctaactatcttactgagttgtaggacatttatccatacctgggaaggctggaattggttgagtatcccaccatttgtgacattttaatttataatgtaactgtactaacaactgcctttgccagatatttacaacacacacacgtgcactgtaactcaagaaatccacagaagctctcccttcagttgagcaaatttcagtggaatacctattctgggtaagctatgaagcccatctctgtatattgtgtaagatctgaggttccattggtggtaggaagtacacataagacagggttccggtattaaaaaatctatttaggaaaacatatctaaaaataggtgagtgagaactttgaccttgtttttaaactctgtttttcaccgttatgaggaaggtgatatagtgaggagggtggtttccaggaaaaaaaaaaaatacagctggcaaatggataaatttaagtatattcgagggcttcagtaatgtaatgcagactgtgatccacttaggaattaaaatctactaaagatttctgtcaataatttatcaactattttaagttggaaaacaaattcataaacatgttaactttttttttaacagtgtaaatttaaagtataagcatttccccaaccctggatctcccaggccccctgtgccataggcagcccccatctattaacagttacaatggatgcacagctgtgcacgcatctgtttgtgtgtgtgtaccctcttccttttgaaaaacatagacacatgctgtacatacttatacttctgtacataaatacatttattagcccatgtaggtgtgttgtgctttttaaaatgattgtgtcgtatttcattacactgatacattgtaatgtatttaactagtcccctatggaaaaacattttatactgaatacataataatttgagactagataaacatctgtcaaagaagtaggaatgaaaattactttcacagtgtttttggttatcttgaaaacctgagacatcttcaaatgccaggacatctctcatgctgtcattcatgacgtaaatatatgagcaaaaaacagaatgaatgaaaaacaggaccacagactattgacagttacttcaactgtggaatccttttattgtttatttagttcctttaggcagttgaatttcattttgcgtgcacagcaatcatattgacttatgctgcaaaatagttttaaataatctcttatacagaggaaaacttttgtggtgctggagtggagcttagaattctctattatggcatttttaggtcatttaaggttaacccactaagtaacgcagtgcagacagcgtcgttgaagtggcagcttgggttaactgtgtttccacctcttctgaattacatcatttttacctgtcattaactcagcataatgtagcacaaattgattttcctaatttgataggttaagttctttaaaataataattaggcatagcagtataggctgatttgctacaaaatgtgttttgcgttgctgattgggccacacatgattggcaaatggaggaactatgtctctacaaagtggaggttacattgtttcaaacagtttccccagtatgttaatgctttattttaccaagtaactggagctgcaggaaaatgaaactaatatagctgaactcatgaggtgtggaggaataagctaccatttatgatgctttgtcttggaggttcttggggtgggagagattcggggagagggttctctttgatctttgtgcattttgttcttacctccgtaacttcgtagcctcagccctcccctacaccttccttcaagctaccatcactctttttttttttttttttttgagacggagtctccctctgtcgcccaggctggagtgcagtggtgcgatctcggctcactgcaagctccgcctcctgggttcacgccattctcctgcctcagcctccccagtagctgggactacaggtgcctgccactgcgcccggctaattttttttttgtatttttagtagagacggggtttcaccgtggtctcgatcttctgacctcgtgatccgcccgcctcggcctcccaaagtgctgggattacaggcgtgagccaccgcgcccggcccatcactctttttaaaggtagagacccagtttaactctatttttcaaaaagtaaattaggttttctgtggctttgcagctgtgcccgtgtctttgttagaattgctattgcttgtgttaatgctgtcctaacagtattgtataggcttgccccaaccctgtctttctcatgagccttgttattattagtgtgcacttttgcctaatgtgtcgtttttcaggaaaacacatttctctttggagcagaggtgtttctgttctatagatatagatagcattgaggtgctcaaacaactggacaagtgttacttagaatgcgatgttgaatagagacagatatcagactgtttcttatgacttgctactttccataagaatagaatggaaaatgtgagaactcgtgttcaacttacttgatgaagtatagcatagaatctttgtcttaaatattaataatatctttgactcaaagggtagaagtgccattttttttcccgaaaaaatgccatctctcctgggatctcctttactgccttttcgggtgtagatagatattcagactttaaaacgatttgttaattctgcatgataacaccatgtgccacctcaagccacattgtcagcatcgacccactcatttctcactttttattaaatttgttgattgggtatgaaatatgagtatcctttgaagtattcctgctaatatgtttttcctctaattcatgccaaaacccgtgattttttttaaagtcagaaaatacttctggaaatggcttaccaaattctctgttaataattttatagccctctgccagggtgcttgtacacctctgaaatccctcattggcttcatcttctttactagactcagctccttgagtgcagggactctttctttttggacagtatcatacattcctggaaggaactaaatacatgttaatcaaaagaaatgttgaggctgggcacggtggctcatgcctgtaatccagcactttgggaggccaaggtgggcggatcaccagaagtcaggagttcgagaccagcctgaccaacatggagaaaccccgtctctactaaaaaaatacaaaattagccaggcgtggtggcgcatgcctgtaatcccagctactcgggaggctgaggcaggagaattgcttgaacttgggaggtggaggttgcagtgagctgagatggtgccattgcactccagcctgggcaacaagagcaaaactccatctcaaaaaaaaaaaaaaaagttgactagattctagcattcagatcctagcccacaaaagagcattcaaatttctagtcgcagagaccattcaaaatgtatccattatgttataatgagaatgagttttttctagggtctgcacgccagagatcttaaactgaggtgggcgtgtgtgtgtgtgtgtgtgcgcacacacacagatttttcatattctgtataaggctgttttcagattctatgaaaagcgctgggtgaagccaacatttaacctatccctgttcctcttcatctgttctattcatcacccaactttccagcctgacccgtaccaatctgtgagtttgtgcctggtattttgaatgcttgacactccttaacatgtgtttgtaaccttgtggctgggcttgttcacctgaatccgattttctgtttctggtttgaattgtggttgttccctggaaccaaatctctctgcttctgacattagtgcagcaacctagtctttccttcctacttttgtccttttttttttttttttttttttttttgcttggcttcagcgttttcaccttggatgtgtctgatcccaaagcatcctgctgttgctcaacagtaggaattgcccaaacttagttcttaacagattctgataataaagttgaacagcatccgcaaattattggctttctaaaatcctaattccttttgggtccgaaaataggatggcatgtgtcataaaaaaataggtagcattttcttatttataactttgctttcttttttcaggccacatttaatgctggatgactgagtgtggcatggttgtccaggaagtgtttgttcgagtgagcgattctgtgatgctgggatgattcagtttgtttgtcattgaaatgttcatttcatccaagaccgaaaaatagcccataaaagagcattcagatttcccttatgcttcactttaagggcagcaggttctctttggcctgctaggttggaagatgataagcattgctgaagttgaatgtcactgacatataaagacttgtcaaaggatagctcaagtatacctagaaaatgatcaaatattagagccgaggaaactcagagaacattttccaaccagctccatttaatagacaaggatgtgaaagtgtagactgatgaaggaagttgctcaggattcaacccacagctggctgataaggacctggggccaagtcagactttcatagtcacaaaatggtgtatagccagttgctttccactgcctttctttacgcattaatgggacctcactttacaatcaacaagaggacaaagagcagagcaccattttttaagaaattgcgattgccttactcagtttcattggctcataagggatcctttgccttcttgggtgcagtgaccaagactgggtagtccctgagcccacatgtccatgggcaggggtcatggggatgtcaagggctttctcttgctctggcaaagttcacctctccattggcctccacatcaccatggggtggagtggagagagggcccaggggctccagaaagagagtctcaccctcctttttccattcccttggcaccagcactcacagcctgatctcccgctgatgtccacctggagtcaccaggattgatcctcgtctacctgggtccacatagactgccaagactcgtgccccaaaaccttaacaagcacaggtattttgtgttcactgctgtgcctctagggcctaggtcagttcctggtacgtagcaggtgctcagtaagtatttggtgaatgaatgaatgaggacctggctgaggatagaagcctcttggaatcactgagtgtcatgcatataacaggcaggctaggacccacaagaacatcacagacctggactgtacttcccacgttgactttgaacagtgggtcaacttttgggagtcatttctgctgtcctcattggtaaaatgagaataagatgctatgatctgtagagtccgtttcagctttaaatttgtggttctgtgctcctcaagcatcagcagaatgtgacttggaacagctttgtcagcatcagacgtagcagtgtttattccccgggtcctgcctgtcagccatgtggcctgcccacgtaaaggctggcacctccgctgtggcctctccctgcatctcccacgtgcagttggcccagtctctgtccgttggaattagcttgagttggttataataggaacatcccaaactgtacagctgtaaaccaaatagaagtcttgaaaaaaatcagaggcttatttttcatttacagagaagtctaaaaggtaggaaagctgtgcttgccgtcgaggacccactgtcatcacaccctccttctccctcactgctccatgacacatgggccattatctttactttctcttcttttttttttctcttgagatggagttttgctcttgttgcccaggctggagtacaatggcgtgatctcggctcaccacaacctccgtccggttgtagctgggattacaggcatgcgccaccacgcccagctaagttggtatttttagtagagaaacggtttcaccatgttagtcatggctggtctcgaactcctgacctcaggtgatccacctgcctcggcctcccaaagtgctgggattacaggcgtgagccactgcgcctggcctgtctttactttctaaataggagaaggaagaggctgtgtctccactcccctaactgaggaagactttccagaaatcaagtcatgaacgcttttgtgttcatctcatcggcccaaaatagagacgatggccgcatctgagtcgaaaggaggccagggaatataatcgtttggtggaatgttagtgtgctctgctgaaaatcagttggtataaaaatgagcttgtcctattgatttccttgtgctgtctttatttcgctctggtttgaagggtttaggaatgaattgagctccacctcaagggttcttggagtcatttgagtggatgaggctgaaatgacccatttgttccttgtctgggtgcaaagcttgcctgcaaggctatctgaaccttatcagataaggttcaaataaggttaaagtctatcccacacaaaaccaccctcccctaagattaggcaaaacgatagggagggtggttttgtgtgggatagattttaaatgctgattaaacacatttcaccactaaatcttcacttttgaagcttttttttttttttttttggtcagtttgagcaatttttatgtttctggagatttaaaccaaaaaactcttcgttttcgtttccagtacttgtcatttgtgcctttgtttggtttttcttgattagttttcccaggggcttgtctattttatgtttttttgaagaacctctattagttttcattaaatccctctattgcttatatcttttgtatttatatgaaaatatacatatatttcttgttttctattctctttggtttgtttgctgtgtttttttttttttgatggcatcttgctctgttgcccaggctggagtgcagtggtgcaatctcggctcactgcaagctccacctcctgggttcacgccgttctcctgcctcagcctcctgagtagctgggactacaggtgcctgccaccacgcccggctaatttttcgtatttttagtagagacggggtttcaccatgttagccagaatggtcttgatctcctgaccttgtgatccgcccacctcggcttcccaaagtgctgggattacaggcgtgagccactgtgcctggcttgtttgctgtgtttaaaaaaagttgttttgttttttgagggagaaattagtatagattgcatggtcaggtggattttttaaagaggaacataagagcaagatattcgaagtgtgaggaacggtatttgtgacagggttctctagagggacaggactgataggatagatgtatatatgaaaggaagtttattagggagtatcaactcacgtgatcacaaggtgaagtcccacaataggctgtctgcaagctaaggagcaaggaagccagtctgagtcccgaatacagccttcactctgtggccaaaggcctgagagcccctggcaaaccactggtctaggtccagcagtccaaaagctgaagaacttggagtctgatgttcgagggcaggaagcctccagcacgggagaaggatggaggccagaagactcagcaaatatcactcaatattaaccatcacagtacttcacttaggaagtattttgaggcatcatctacatttatagcatattagacactgaaggaccgaaacgtgtcatgaaatgcccacgtcccagagcccctgatctacagaaggaggtggggacaaaacatgtactgctagagtagagtggagaaaacaaaaaatagaatgaatgaacatcgagaaggcagaggtgaatcgtttgcaagaaaggtttggcagtcacagaggacagaaaggtaaatgtgaggacagcaagaatgagggagctggaggcactggggcaggagcgaggcgtcctatcagaaactgtttttatcactgactgttcagtccttcatgtcagctagatgttctcaactacccaaatccactgtagataaaattcttcaagacatgacagagttaactcgcattttctctgttatcagggcggcttttgttacatggttgcaaacctgttctacacacctgctttgccaccttcacttcctgacaatttctgatttccacttcagcttctggagcattctgtctcctgcccttccttttcccttcttcctagtggactcttcatttacctctgcctggcttctaatctgcctcttgtcccaattccccatttccatgtgttctggccccagctcattctgttcccgcagacctgatttctcaccttatttcctgttgattccttctcagctgtagcaggcatgcctcagtctccccaaggcaggctgccttgtggcttggcagaacaaaaggcaggtggggaggaggctggatttagaaacaagtgccgtgtctcctggtggtgatgagtagccttgcaagagcccttcccagatgacctcagtccagatggagatggcacaggagggtgcaggaagaaaactgcagtttcaaacagcttctgtaggcacaccaagcagggagaattagcactgctagctacttatgaacagggatggcataaggttggcttgtactgagagtggcctgatctgttgtggtctttttttccccaaagcgtaccatacccctgaactaagttagaatgatatcatatagagagagtttctaaccatttttcccccctttgacaatattatgacaggtatgcagaaagattaatgtgtaagatgttgatgggtacatcatttacaacagtgaaccactggaaacaaatgtccactggagaagataaaagaatgatgatacagttagtggtttctgacacaactaataaagaaagtgaggtggacctacaagtagatgcatagaaagatctctgagacatgctctatggaagacatcaggtcacagaacagtgcagaggatatgaacccgttatgccaaaaagaaacagtgtcttggctgagcgcggtggctcatgcctgtaatcccagcactttggaaggctgaggcgggcggatcaccttaggttgggagctcgagaccagtctgaccaacatggagaaacctcgtctctactaaaaatacaaaattagccaggcgtggtggcgcatgcctgtaatctcagctacttgggaggccgaggccgcagaatcgcttgaacccaggaggcggaggttgcggtgagccgagatcatgccattgtactccagcctgggcaacaagagcaaaactctgtctcaaaaaaaaaaaaaaaaaaaaaaaagaagcagtgtctctatgtccacacatgtctgtatatgtatatagatatatatagaaaggacaggaaggggaggctttaggattactttaggtgttcagcagtagaagaccaccttgcacactgggtgggtaaaagaaatctgctcagcattgttctttcatatttcacctcgagctttataaaccctgccagaggaagatctctggggccaggagttcaagaccaacctgggcaacatagtgagacccccatctctaaagataataaataaataaacaaacaaacaaataaaccctacaatggacctttgcaaagagaaattagtcctttgttgtgtaagttgcaaatattttcttccagtctattgtttgtcatttattataataccatttatcttgtagcaatgtaagaaaattgtgtcaggaagtctttctttttttcattacaatttctaaatttggagtcctgcttgggaaggcctttctcaccataagattctacattatcttcattttcttcccctgatgtttttttcagcattttatttttttttacaactaatttaattcatttcctatttatttttctgggtgggtggtcagagtaatggaacatatccaaatggatatccaattgccccaaaactatttattgaataaccaatggacccagttatatttattcccaattcccatacttctttggactgtttattaaaatttgtctaaaattgagtgtctgtctacagaagtccaattaagtgagcgattaatgttgaagatttgagaaacacttgtgtgatgaagtgtctagcagagctctggcactaaatggaagatgttattgtaacacagaaacaaaaataacagagacagtgtggatataaggctttgaaatgcgttgggcagggtgtctggataaaaaagtcatgcttgtggtcgagctccaggtaaggccctggattgcaaaaggcaaaacaacacaaaaccctcaatctgctttaagaaaaagtaagcttcttaaaaggactcagcagtagacattcttagtgatgctacaccctaatgatagccggtatccccgcaatgggagataaaccactgttgggagccaaggcttctccatagctgaggggccacatctcctattttcttctgtctttctgtcctcaccacctgtattcctgtagatttttctgtagatggtccattgaagccactggcccttacaggtctagccccactaactgtcctctcctattttaaaatcccaggggaatctagtaaactgtgcatcctaccttgttcaatcaactctggcttcagggatgagagttgtcacattgtctctggggtggctgcttccagaggttttagggcagatgaatctcaagtctgttgagcatggcagataaatacccttcttctctgcttccctacaggtaggcttagagcaataattttctactattttttaaaagcagtatgactatatgtaggaaaatatcggaagttggccctaggcaattgtgaaataagggaagtttatttttgcatgcctgtcctcactatctttccccatagaagtttttatttggggattgcctgcatttctaaacttttgaaaggctgttataacatacgggttatgaaagtgacctctgaggtcagactgggttcctaatctgcttctccaagctttgtgaccttggacaagttttgtaagcttgccaaaacctcaatttccccatcaataatatgatgttattaatagtcctgacctcaggggttgttgtgaaagttaaatgaatgtcgagctttaacaatctgatgcttagtgaaagcttaatgtttgttttggtgctttctaatgaataaagaccctgatcatgataatgcattcttgttgctctttctgtgtatccctgtcctttcccacattttgagatttactttctgtagtttgtattctgaaaataatatgtcattagaagtataatgaacatacttttttcaagcaaaatttctctcttcccacctcttgccacattttagatatatataaattgcctcagcactttaaacctcaatgacatgttgctaattagtgcaaagccattaatcatcatacagacctctgttccaagtccctggcaatccactttcatctccttctcctgggtgcttgttcatgtgcaaggatctggttaaatccttcctgcttaggccgaagtggctgatgaggtctgcgttagttcattttctgttgctttaactgaacaccacagactgggtattttataaagaataaagagggtaatttataaagaatagaggttgatttagctcatggttctggaggctgggaagtctaagagcatggaactagcatctggtgaggcccttcatgctgtgtcataacatggcagagggtgttacatgcaagagagcaagagtgtgcatgtcagctcaagacactcttcctcatcttataaagccaccagtcctatcatgggagccccatcctgatgaccttatctagtcctaattatctcccaaaggccccacctccaatcaacataatgaatttgggaattaagtttccagcacatgaaagttggggaagaaaaagatggccttcccatgcagttgtcctggtgaagttattctattatggtagaatagcttggagctagatgtcttttataggaaatgactagtgaccgtattttccataacaggataccccaaccaccacaaactttattgcttcggttgcccatgttatttatttatttatttatttatttatttatttatttatttatttatatcctgccccattccaaaggggacttgcagatttagttagcagatatcactaggtgttgctaaagattatgtctgatttgggacaagatctgcttttggggacttggatcactaataagctagaccaccttagccactattagtggcttgaggattggctgccactaatcctgctcatccccttaccactgatactcttgtgcaaggaacccagtaggttcttgtatatgtatattttgagataccagcatttactcgcagttggaaggaagaacaggactaagtcttatgccaagtctgtagtaagcctttggctacgtattagtccatagtgtgtgggcacagaaatcctgtgaatggaaagttccaaccacgtctgctattctgaagacacccaggtcagccaaatatgggaactgtgtatatagcaaccccatctccttccctttctttacctaccctgccctctgttagtcatgtggactctaaaatcctccaaccacacccctactcactgtcacctcagttacctgggatggatgattaagaaagtctgcagattactggctgcagttgtgaccacattggcttggatcttgcaggtgtgcaaggattcttttgtatctgtaagcatgaggtcagactaaatcaaccttctcaggcccttttcaaaaagtttaagtccacagccttatctgggcattttgggttttaccttgaaagtagcaaaagggggcaaattaggataaactaaagaaaaataactcccagggataggaagctcttacaggtttgtgggctgaattgtatctcccctagaagatgttgaggacctaatcccccagtatctgtggatgtgagcttatttggaaacaaggtctgtgcagatgactaaattgagatgaggccattagagtgggcctttgtattagtacattttcatgctgcttataaagacatacccaagactggataatttataaagaaaaagaggtttagtggactcacagttccacatggctggggaggcctcacagtcatggtggaaggtgaaaggcacgtcttacatggtggcaggcaagagagaatgagagccaagtgaaaggggaaaccccttataaaccatcagatctcatgagacttactaccacgagaacagtatagggaaaactgccccccatgattcaattctctcccactgggtccctcccacagtgaatgggaattatgggagctacaattcaagatgagatttgggtggggacacagccagaccatatcagctttaatccaatatgactgtggatccttataaaaatgggatatttggacacagagacagacatgtgctgtgagaagatgacgtgacaacataaggagaatgccatctacgagccaaggaatgcttgcagccaccacgagctaggcgagaggcctgggacagattctccctcacagcccttggaagaaccaaccctgctgacaccttgaatgtagacttctgggctgccaaactgtgtggcaataaatttctgttatttaagccacctagcatgtggtacttcattatggcagccatagggaactaatacaggagccttttataagtcctagatctgccccctttttcctggcatgaacccgtttctccatcagtcagtgtgaaaagccatcttctcatcatcacttaagatttcgagtttgctttactgcccacattttggtttggcgctggggcctaaagattgtttcctgactcttctgttattctctcttaatatttcctgagatgtctcattgttattcttgttgagtcatatctgccatcttttgctgttctataaatgtacccaggacttgtttggagcaggtataatacacacagatgcaaaaacgattgccaggaaggaagaagtgttttattacattcgcagtcgccaagaaacagtaagcacatgagcccattcagggccacacgggaaagcaccaaagccacatgagcaggcacggaaagagggagctgcacgcattagccttgattgcagttaacaccgaaaggagtgggcaaagcaaagtcaacacgtggcagaagttcactgtcaagcttaaatctctgtggttcatgaaaaaaaaatttactatgaagcaggctctgggctataggggtggtccctagttgtacctggctccgtggagattagggcagaagaactgcctagcagaaaagcagactcctggagggctggactccaagtagttggttggcatatcaaaggcatgcccacaagtgagttacttgttacctctaggaattaattaatcctgggaggggcagtttctttggtccacagactccaaatgccacagcatcaagaatatagaaagtaggaaaatataattaatacattgacattatccagctgttcagttttatatagctattcttccctccccacttcaatttatactttaaagaattccttataaggtcaacaaggctcctgacaatagcatttgcgatataccctcttgtctcttgtcagataactgtctggaaagtgcaggcttgttatatagcaccctctatccatggattttggctgttccatttattggtgtttcctctttcttcaaaagctgtgaccttcagagggaagcaaagttggaatgtcatcagtagcctaagttttatctccagcatttccagtgctaggcaacatggtgaagctctatctctacaatatctacagatacatctattgatatatccagggttttttctggccctctcatttgtcctcatatagattggatatcttttttattttcctgcttattttccattccccatttctctggttatagcccctggttttcttcaaggagctatcccttccctactcttgagccgtgtggtgtaagtgggactaacttcaccctttgattcagggaagggatgtgacttgggtctagccaaaatcattgattcacgcagagcaggtgaatcaaattggaccaatcggtatatggtttttttctattctttttttttttttttttttttttgagacaaggtcttgctctgtcactcttggtgcagtggtatgatctcaactcactgcaacctccacctccagggttcaagtgattcttgtgcctcagcctcctaagtacctgggactacaggtacgcaccaccatgcccagctaacttttgtatttttgtagagatggagtttcaccatgttggccaggctggtctcgaactcctggactcaaatgatctgcccacctcgccctcccaaagtgttggggttacaggcgtgagccactgcacctggctaatttttgtatgtttatagaggtggagttccgccatgttggccggggtggtctcaaactcctgagctcaagcgatctgcctaccttggcctcccaaaggggtggggttacaggcgtgagccaccgtgtgcctggccatggtatattgtttttctattcctgctatgataaattatcacaaacttagtgactttaaaacaacacaaatttatcatcttacagttctggaggtcagaagtctggcacaggtcttaactgggctaaaatcaagatggcagcaggatgttgctgctctctggaggctctaggggagaattagtttccctgacttctcaggtttctctggaggcagcccactttgtttgccttgtggccccttccgccgtcttcaaagccagtagcactgggttgtgctgtcctcataccacatcgctctgatccttctttggtcacatctccctctgaattcctcttctgcctcctcttccacttttttttttttttgagatggaatcttgctcagtcgctggagtgcagtggcgcaatctcggctcactgcaacctccgcctcctgggttcaagcgattctcctgcctcagcctcccgagtagctgggactacaggtacccaccaccacgcctggctagtttttgtatttttagtagagacagggttttgccatgttggccaggctggtcttgaactcctggccccaaatgatccactcgcctcagcttcccaaagtgctgggattacagtagtaagccactgtggctggccttcctcttccactattaaggacccatgggtgacactggacccacctggatcatctgcagactctgcttatctcagtgtctatctgaaccatcttcaaagtctcctttgccatgtaaggtaacatattcagggtgctgggaattaggatgtggacttttgggaggcggggcattattttgtctactacagtcagtgagattcaactctgggaccttggctgggtcccttgggattcctgagcagatgggctttcaacctgaagctgctgtcagccaccttggatctgtgaggggagagtctgccaaagaatggagtcaaccttaagaaaaacagacctgagagacacggggagcaagaccatgtctcagtgttgtccttagggccactaaggccaactctacccttgcacgttttagtcattgagtcaatcaattgactgccaccatcattacatgtgtcctcctcctgagttggtaacgcaggcacaacataaatgaattcctccttcattgtcctttggagcatagggggcagccttttatcaaaaacatctgcattgatgacccacagacagagtgtcatggtggcacattgttccagtactggaaattctgcttctttctttcccagggatcataatctttcaggttcttaccaggtctttcatctgtgaaatgatggggttggatgtacagagtgttcttggtatctacatatgaatgttcattatacttgcacgggatggctgagctggtagaatcctttttaagatgattggggccaggtgcagtggctcaggcctataatcccagtactttgggaggctgaggtggcaggatcacttgaagccaggagttcgagaccagcctggacaacatagtgagatcctgtctctataaaaatacagtttaaaaaaatgagctgggagtggtggtatacacctgtagttccagctactcagaaggctgaggtgggagattgaggctgcagtgagccatgattgtgccactgcactccagcctgggccacagagtgagaccctgtctattaaaaaaataaaataaaaaaaaaggccgagcacaatgtctcatggctataatcccagcactttgggaggctgaggcaggagggtcgcttgggcccaggagtttgagaccagcctgggcaacaaagtgagacctcgtctctgtgaaaataaataaataaataaaattaaaataattttaaaaaattaaaaaaatttttttaaaggttattgcacctaatttccttacttaacagatgagggaactgagacctggagaagctaagcatcttcactggagaatagactgcttggaaacagcccaacgagaaataagaacttctgattgctaatcctattatataccacatttctaaaattccttgacctagtttagtgaattcatgtaagtttgtttttccctacaatgtgtaaaaaatctaatgtcattcactgagataactcaagatatttgagtctcaatctgagaactgacataatatttagcatgccatcttttgctaagtgtatttttataaaataaaattattgtgccaatttcctcccattttacctctcacaagtggatagttctagaatctttttaaacccatttctaagatcaaggagagacctggagacaatactaaattcttgagcaatatgaaaattctgcatccaagtattaatcctaaaggattctagggagaagctggtctgagtccatgtccctgatttcttctggggaatagcacaggggacaaataaaatggtggctattcttatctaatgctctccaacataccacctccaaacttgtggcttaaaataacaatatttgttttcctcttgaatctgctatttggacagggctcagagaacaacccatttctctcgcattcaacatgggcttaaatgctggggctggtgtcatttggagttgtgttcgctcacctgtctgtccatctgtgctggccatcaactgggaccttaactggagctgatggctaaagaccctcatgtggccacgccatgtggcttggacttcctcacagtatggtggtggggttccaggactgagcatccatgtcacctaccctgggatgtcattactgtcacattttatttgatgaagcagtcaaaaagaccttccctggttcaaggggttagaaataaacttcacctctcggtggagtggtagcaagactctggtggtcatatgggctggaagtactactctggcaattgtgaatgaggctgggatttcatctaaaatggccagagatgcgacagtgctaagcttagtttttcatttgtgtgtatgatttttcttttcttgtcttctttggcaactggtgtgaattgagaggccagagtgttactctcctcaggcttagggtagccactgttggttttgaaggagctatttgataccgtcaaccacaagagattcagagaaggctgaactggaggtctgaattactccttgtgattaggacatgatgagtatttgcatctagtattcttccagtgcctcacctaactccgtcaacaccagcctacaagaaattgtatctcccaccatctgctgttgttctaccactcaacacaaatatctaacctgtacaagtactgagggatcacacgactgtgactaggcagagaaacatcacagcttgcttaggaagtcttagtaacacgaagttatgagcacaaactctaaactagaaaatatggcagctattgaaatagaactgaataaggagagagaagagtactttaacaaaatggaataagaaagataattagcatgcaaaaaaataaaagactgtatggaactaaaagcattgtttccacaatataaaaactatttttttcagatgtgctaaaagaagatcactgctaagaacataatcactattctgaaagatgaaggggaagaaattctttttcccatagaataaagacacttagagacatgtagaggaaaaagatacgaaacttggaggacagattcactagacttaacatgaataacaagagtgcctcgaggagaaaaagagctagagagaagaagaataatagttaaataaaagtagaagaaaagttctctgagttgaaaagtcaggcaaggtgaatgaatatttcaaactacatgtatagacatttcctggtgaaatcctagaattttatggataaagagaaagttttatgcatctggagaggcagaattagaagaatcagactagtgccagatttctcatcaccagccctagaaagtagaagaagacaatagaacaatatctgtagatgatttatacaaaaaaaaattgcaatacacaattctacatcaagctcaataaccattttttgtttgcaagtttgacacatgaaggccttggagtttattactcttgtaacttattaagggcatcatggcctagagtttattacttgtgtaatttcactggggaaaacaattggtaaagtgtcaacatcagtagaaatctcaacaagccgaaaggtaagaggtcagaaatcagtagtgaggctgggtgcggtggctcacgcctgtaatcccagcactttgggaggctgaggagggtggatcacgaggtcaggagatccagaccatcctggctaacatggtgaaaccctgtctctactaaaaatacaaaaaattagctgggcgtggtggcgggcacctatagtcccagctacttgggaggctgaggcaggagaatggcgtgaacctgggaggcggagcttgcaatgagccgagattgtgccactgcactccagcctgggcaacagagcgagactcatctcaagaaaaaaaaaaaaaaaaggaaatcagtagtgagcagtgaatcttgtgatgaatatgtcatttagtataaggaaatgagattatttttaccaggactttatactgtatcgtaagtaatgactattgcagcgaagtcattacttaattacaaagtaatgactgttgcagcaaagtcattacttaatgacaaagacaaactggaagtgaaaaccctaataatagcttgaagtcaaatctcaaccaaactcaagagtggggtgggagttgggggtggaagacactggaaaagtaaacatgttctaaatgtttcctctaatggatcaggggagaagactgaggaggcagagtagctggataggaggacagaattatctcttactaatatattagagaagaagttaaattatgattttaggggttggaagttcctgtatgaattgaattgagattttaatctcctgggtaaattgccctacaacagggaggtagctgatcctcagaaggcaacttacagatctgtatctcatcgtctgccttaatatttttgaccctaaatgaattgaggttattttgcttgtaagagttttacccgtaagttctaacctcaaaacacataatcagcaccctgcctttgcaccccacagcatcagcctagaccacagttgcctaacttcatgtgtggctgcatatctgctaagaagccttcacagtgtaagagagagagaggaaaaaaaaaatctaccctcttaagatctctggccggggccctggaaattagaccggcaaaagattaccaagagagaaacagagtttattaacatgtgcagtgtgtatacatgcaggagagagaaactcagtgatgagtaattcataggggttattggaacctgggcttgtacagcatcttagcaaagaagaataaatttagagagaggtgaaaagacaaagggaaaaggtttttagtcttctaggagctgtagaccctgggaaggtaaatgtgtgggggaaactcatactatcttagcagtgtttgtgcaggtctgtcttggtgctgacttttcatcttcttcatgtccgtaaaacttccccaagagaggggatttacggcagcctttacttctcaggagtttctgcttttgaccagataaggggacctctgagaaggcttctttctgcatttgttgattctcatttgcctacagctcaaaataatccttatccaaagtggcatattatagggtagcatattctgatcttctataacagtgtggtttggagattgattgagtcatacttatgaagaatgtggaattacagaaagtgagaggagagatctagtatgttcacctgtcactcacaaggaaacatgacaggtcacagttataagaaggaaccaactgacagttccagcaggattatgggggatggggaaggataccaaaagagaggccacaaagcattcacattaatgttttatctagacatggactcttctcctgtctcacggaggtgatcagggaagagcagccttccaagcaagctaacttttttatgagtccgtcatagccctgccctgctagaaatgccaggggtgggaggcatgtaaagagtaagtccctgtttcttgtcttggtcctctcaccaaagtgaattgtctccatagtcttgcttacaggaagcggggcaggcttcccaggggaaatttgcaagtcacaattgtgcaccaggatattttgtcatttcagcatcacagacttgcaccttggagacctatatttacaagctactttctgttggacttgatcacaggtttgtctttaaggacagtacccagaacattaggctggcaaaagactttgggagtcatggaatctatccttacacgttacacagagtcacacataaactccacccagggaatctttttttcaatgacagatatcaaggaaaataatgtgaaggagtgattagaaccctcttgggacacttttcttatagattagatgctattcgaccaggtttatgccatggtctctgacaaaccacataaatcttgttgaatagcacctaacgtataagaaaccaaaactgggagtagagaggtgatgtggttagtgcaggcaatgcttcctactctattctacagctccatgattacgttataatcaacccttataaccacaaaggtcccagagccctcagaatttgcagtgacaaagagacggtggatgagggaggtgaagaatatgcttctgatgagtctgtttgggctgcaattgcaaagtaccagactgagagcgttgtgctacaaagactctttcctcctatttctggaggctggaagtccatgaaagaggtgtcggagggtcgttttcctctgagggctctctccttatattgtagatgccatcttctctctgcgtcttcatatggtcttccttttgtgtgtgtctgtatccttgtcacttcctcttcttatagggacaccagtcatactggattagggcttaccctaatgactgcattttaccggaatcctcttttaaagaccatatcttcaaatacggtcacattctgaagtactgggattagaatttaatatgaaatttttggggaacacagttcagtccttaccaactacagaaatcaaataaaaccaaaaccaccatatccattatattacattccaaaaccacatgcaagatcgtggagaaagtccattcttcacaaccctaatccatgtgcaataaactgagaggctaaaaagccaaaaagtcatttaaaaagtcatatatatgcattttatatatatatatatatatatatatatatatatatatatatgaaatgtgtatatattttatttatttttttaattttttttctgagacggagttttgctctgtcacctagagctggagtgcaatggcgcgatcttggctcactgcaacctccacctcccgggttcaagcagttctcctgcctcagcctcccaagtagctaggattacaggcatgtgccaccacgcctggctagtttttgtatttttagtagagacagggtctcaccatattggccaggctggtctggaactcctgacctcgtgatccacccaccttggcctcccaaaggctgggattacaggtgtgagccaccgcgcccaacatatatatatattaaaaatatgttatatattaccataaaagagcataaaattatttggaggacacaagaaatacatatttaagggtttggtataataaaagtaaagacatttgaggttaaaacatcttatttttgagaagaaagttttaagcctggggctcgaaaataaccttgggaaagattcatgttgttggagagactcagagagcagtgaagaatataggatttggattagagatttaaaaataatgtctagatattttggaacgagcaagaaaattcccattttaggacgaaggaaaaggtaacatttggagagaatctaaaacatatactgtgttttcataactcctcttacaaatgtagtcatttggttaacattagcaatattaagataagctatctataacttggtttgttcataaatttataacatgtggtatacaaaatattccaatcttcactattttgtcatttttaaattttttttttatttttacaactggaaaaatacatacaacataataaaatttaccatcttaaccattttcaggtatacagttcagtggtgttaagtgtgtttacattgttgtgcagccattgccaccgcccatctccacaactctttccgtctttgaagctaaaactgtgtccatgaaacagtaactccccactccccttctctcatcccctggcaaccacttttgaaaatacattttacaatgtatgtaatgttcattgtagaagaattaaaaaatttaaaacaataagaacagagaactaataacactttgacttataccttaatgtattttttctctgcatatacatatatgtaactttttttttttactatgcatactgttttatagcctgccctttcacacttaatatatcttcaatagctttacatgtcaaataaatgccatcctttttaatattgaaagtcaatttatttaaataacccccattatatttttccagtctgtgaagggttggggacaaaagatgaagtacaaacatagacctttatagagcaatgctctgattacttttttttccatcctcaattatttcttgtcaacaaataccgtcttttttttttttttttttgagatagagtcttgctctgtcactcaggctggagtgcagtggcgtgatctcagctcactgcaacctccaactcccaggctccagagatcctcccacctcagcctcccaagtagctgagactacaagtgtgcacctccacacccagctaatttttgtattttattgtagagacagggtctcatcatgttccccaggctattcttgagttcctgagttcaagcagttctcccgcctcagtactgtgggattacaggtacaagccactgtgcccagcctgaattccttctttactttgaggaaggttttctacatttttagccttttaatacgtactgccagattgccctcaagaaaggttgtatcaggtagtacttccagcagcagtggatgagcatccctatttccagacctccagcaaccctgtgtattgtccttaaagaaacaaaattgaaataataggtggatgtggttttcaaaatcaggtagtggagaagggtttataatgaaaaggtatcagcccacttagcctgatccagctcctagtcctgctccctggagacactttttaataccttctgtgtttatttcctctggtgatttacctccatctctctacataataggtttatactgctagtttacatacacatatgttatttacacactatttacttcctgctggtgagatgaggttttggttccattataccacccactttctcctccatacccatttttaaaattgttatattacctttttacttatatttaaaactccctgcagttagcatgggcagttcagtttctcttgactgcctttagtgagcattaaggaatgggactcttctactcttttctttccttctctacttttggctttggtcaatttttttctttttctctctcttcttttactttctttcccgcctttcttccttttctctttttgtttgtttacattttgaagattgatacaatttacatttcttgtttcgtaatcacatagtttggccttctatgccttgtccataagttagctctaaaagttcaaaagtcaattaagtgcttttatcgtggctccttaaatgtagttccttgtggacctaagtaacatgttgattaccacctggtacagtttggttctgtgtccccatcaactctcacgtcaaattgtaatccccaatgctgtaggtggggcctggtgggaggtgattggatcgtgggggtggtctctcatgaatggtttcgcaccatcccccttggtacttgtattagtccattctcgcactgctgtaaagaactacctgagactaggtgatttataaagaaaaggggtttaattggctcatggttccacaggctctataggaagtgtggctgggaaggcctcaggaaacttacagtcctggtggaaggtgaaggggaagcaatcatgtcttatgtagccagagcaggaggaagagagcaaagagggaggtgctacacatttttcaataactggatctcgtgagagctcactgtcttgagaacaacaagggggaaatccactcccatgatccagtcacctcccactaggcccctcgtccaacattgggaattaacaattcaacgtgaaatttgggtggggacacaaatccaaaccataccagtactgttcttgtgatagtgaatgaatgagttctcctgagatctggttgtttaaaagtatgtagcacctccccccgtctctctcttattcctgctccttccatgtaagatgtgcctgtttccccttcaccttctaccatgattgtaagtttcctgaagcctccccagaagccaagcagatgccagcatcatgcttcctctataacctgcagaactgcaagccaattaaactttttttctttatgaattacccagtctcaggtatttctttatagccatgtgagaaaggacaaatacacatccccttctctgtggatccaatatcaagatacctattccatataaaggagaattttcttagtgccaaggccaaatggattctgttttcttgcattctacaaagtattcaattgtctgtgacttttctttgattcatcttttaatcataactttcctgggcatatttttttgcctgcaattttatggactatcttgtttttcctgtcatgagaatcatatgccttcataccttccaatttactaattccatctgttattttgactgctttctttatcttggagcccactgaattctaatttggttagtctgctttctaagcctcctgcaggtctgacatcctgcaatttcttctcgctggacttggatttaagtccatcatatcttactggattaggtttttatccttatttttcttggagtacattctcaagaaactttctcgaaagataggtaacctcctaaataatatgattttattttgcttctatatttgactgataagttaccataatatgaacttttagattcaagcgaattttcattcagtactttggaattgctctgttatatgctagcatcgatattgctgataaattctgttactggttactgttgcagcctgatggttttttcccctctgaaagctttttaggatctctttatttttcactctgcccctcacagttcaggacctttcagtttgaggacttttgtgtctcttcagctctatgaaaattaatatttatctgtatctcttttttttctccctctttcttaaaaatttccattctattttccctttcttttttcaggaacttcaatcatacatgactttactttgaaagtctcagcagaaacttaggaattttattttggtttttagtaagttttctctgtgcttaaattagtcaattccgcggtaacattgttttgaaaacgtggatttatcccgacattagcgtaaccatgccattttttcccctcctctctgttgtcccctaattcccatgaggtgactttcctttccttagcttaattctctttatttaatagcctttcgttgctgctaagggacagcttttggcggctgctttgcatccccacattagagtaaccatgccatttttttcccctcctctctcttgtcccctaattcccatgaggtgactttcctctccttagcttaattctctttatttaatagcctttcattgctgctaagggacagcttttggtggctgctttgccatttcagacttttcccatgtctctatgtggcagatcttacccagccttcaaggcttgcctatgccctcctcctccaggaagcctttctcaatgactctccaaactatctgtctagtgagtatttctgtacttaggtttatatacagcttagtgttatatgaagagctttagggagaagtcaataattgctctaatgatttgtgtgaaatatgtgcaatttcaagaacatcaaataattgcatttttactctgaataaaactaatcttaaaatgtgttcctctgctgcaagtatatgaaactagaattgcattgaagtatagtataagaaaccaccagctgggcgcaaaccaccagccaggcttggtggctcacgcctataatcccagcactttgggaggccaaggcagatggatcacctgaggtcaggagtttgagagcagcctggccaacatggtgaaagcccgtctctactaaaaatacaataattagctgagcatggtggcgggcacctgtaatcccagctactggggaggctgaagctgaggcaggagaatcacttgaacccaggaggtggaagttgcagtgagccgagatcacgccattgcactccagcctggatgacagagcaaaactcagtctcaaaaaataaataaataaataaataaacaaataaataaataaataaataaaagaaagaaagaaggaaagaaaccaccacttagaacgaatggctttggacagagtttgtttctgttgaaaataagtccaggtataagtggttgttggggatggaacagtgagtcagtgatgtcatgtctgccatttctgcagttctctgtgccaatccttcatggttacaagatggctgctgccactcctgccattatgtcagcattcaaaatagaaagaagaaaaagaggctgacggttgagtcttaatcatttttattaggaaagcaaagctttcacagaggactttgcagcatacttctgtttttgtctcatggctgaagaccgggtcacatgggtccccctagtttcaggggaaactgggacagtatggctttccaccctctgtcgtgggaggcagcaaagaagcagaggtggagatgagctttaggagagccagttaacaaggtaacagagcctgccacaatgggcaagagagggcattaaaagcagttgtgcccaggcgcggcagctcacacctgtaatcccagcattttgggaggctgaggcaggtggatcgcctgaggtcaggagtttgagactagtctggacaacatggtgaaaccccgtctatactaaaaatataaaaattagcagggtgtggtggtgggcacctgtaaatcccagctacttcggaggctgagacaggagaatcgcttgaacccagaaggtggaggttgcagtgagccaagagtgtgccactgcactctagcctgggtaagaagagtgaaactctgtcttaaaaaaaaaaaaggcagttgtgcccaattgtattaaacattctactccattttaataagcaagtgcaggatacttgctatgccaggtgactgtgctgggtgcaggtggtgctgtgaatcccacgaaggattgtctggggaaaaagggaaagttagatatgcctggaacacagagtatatcgggcagggcaggattggagagggacagaatgggggtcaggagatggcggggtgggggtgggatggaaaatggggaagatttagaagacattgaagagatgagtttgttaactcagagtgggtgagctccaggtcagatattttggattttactccacacaccagtggttctgaacatgtcttagaatcatctggagggttggttaaaacacagattgcttgaccccactcccagaatttctgattctatgggtctgagctggggcctgagaatttttatttttaacaaatcttcaaagtgatgctgatgctgctggtccagggaccaccctttggcatactgtgctaaaaccatgacttaatttagagtagattcattttcttgtataaaaaattggggtctgggcgtggtggctcatgcttatgaaccccaggactttgggaggccaaggcaggaggattgcgtgagcccaggaatttgagaccagcctggacaacatagcaaggccttgtctctactaaaagttttaaaaattgccaggtgtggtggtacgtgcctgtagtccccagctcgggaggctgagatgggaagatggcttgagtccaggagttcaagattccagtgagctatgattgtgccactgcactccagcctgggcaacagagcaatactctatctcaaaaataaataaataaataaaaagggggggtgcattataacaccctcaagctattttaagaaatgtattaggctgggcgcagtggctcacgcctgtaatcccagcactttgggaggccaaggcaggtggatcacctgaggtcaggagttcgagaccagcctggccaacatggtgaaaccccgtctctactaaaaatacaaaaattagccaggcatggtggcaggtgcctgtaatcccagctactggggaggctgaggcaggagaatcacttgaacccgggaggtggagtttgcagtgagctgagatggcgtcatcgcactccagcctggaggacaagagcgagacttcgtctcaaaaaaaaaaatgtattgatgatattttcttatattctatgttattccatcatgtgggtcacactgaccagttagagctagaagctctaactgctttctcgagctagaaaacaccttgcctgagagcatatcttggatattcaaaatcaaccaatccatacccccactcagctctttttatcaggcccctgcagctctgacctctttccatgtgtcctaagtcatcccagggccaagtactggacactgaggaccttcctatagccttgagcccaccaaaattattaaaagcatccaatcccaaacctgttcggcttgcttaccttgctttactaattccctcccacgaaaaccacaggaaaggcttttgcgggtactcttccctcactccctctgcctcttgaccagccctggtgtgtccccatgtggcgctacctgctgattctagggatctgtgagtataaacttgacagtcgtgttcatctctgtgtgtcttaccacagccaataaaacaaatcctgcgtacacattaaaatagtgatacaatacttgtaaagtgccagcagaacacctgctaggcactaggcaaaagggactgctgggaggaatattaggaggaatgtctgagggtagtgtgaaggatgaatgggaggtggagatggggagatgggttagaaggatattgtgggctgggcgtggtggctcataatctgtaatcccagcactttgggaggctgaggtgggcggatcacggacaggagatcgagaccatcctggccaacatggtgaaaccctgtctctactaaaaatacaaaaattagctgggcatggtggcgtgcacttgtaatcccagctacgtgggaggctgaggcaagagaatcacttgaacccgggaggcagaggttttagtgacccgagactgtgccactgcactccagcctggtgacagagtgagactccgtctcaaaaaaaaaaaaaaaaaaagaagaaaagatattttgatagtccagggctgagtctgatggggcctagctcgggactatgcaagtagaaagggaccaatagttgctgaaaatatttgtgatataaaattaagaggatttgacagttttgtcagtgttgcaagttggaaacttatttatctgaaattgtttgtaataagaccgtctctgcatcatggctgaaaaagcagcaaatgcagcaggaaaacagttctgaaagaagaaattttgcagttaagatttacccagcaaactgcaacattttacattgcccctttagttacttactaaagatgttttgaaaacgaacaccatcatctaaattcatttaccgtagactggtcctgttcatatagccatttctatttggaaaaggttgatttgattgatcacatgcccttggaaaataggggtgtctacaagagacccaccctggcttagactctttaagggaaaaaaggaaaaagaatctcaaccattttaagatcatcgttggtttataaaattttcaatgcttagttatttaaagaaaatttaattaaaagatatttaggaagtattaaatttgctaacatgttcaaagaactttaaaaaatgaccaaagataatcctggctaacacggcgaaatcccgtctctactaaaaatacaaaaaattagccgggcgaggtggcgggcgtctgtagtcccagctactcgggaggctgaggcaggagaatggcatgaacccgggaggcggagcttgccgtgagccgagatcgcgccactgcaccccagcctgggtgacagagcgagactccgtctaaaaaaaaaaaaacactaaagatatataaacattattgtaattaataggttaaaaaaataaaaagactgtctctgccttaagtgcagccttgctgctttgttcagtgacttcttggatggcatcagagaagtcctccttgcttgactctagtccacataaatgtctttttggatgaggccagaactcccaggtagcatgttaaggaagatattgcaagagtcaagaggtgctgtagtgattatcagctccacatttcctaaagtgtattcacctggtgttcatccacacctcagttatgaattagccgttacatgaaatatgttttcatatttttagagattgggaaatgacaggtgaactaaaattaagccattttatgtattgcagaccttttcagagcctttaatatggtagtgggattctgttaatggaaattattgtattcagtgtttctctaactcgtttgttcacagaacctttttttttttcagagcgtcttatgaatctattttttcatggaacaaattttgggaaacgctgccatgacctaacaagctgatgtataacactggtggcaatcaagatttttgtgggtggtgttgattgttctcctgaaactcataagtggaacagtgcacaatttcaagatcagtttgcccaggctctgttttgcttttagtctctcgtatacagaaagtttaaaaagatatgacttgtacccagatgtcatctacacagcgcctgtcatcctgtggaatgactcatcccttgaaaatggtggatagtgctttttaccttgatgatgaataatgatccttgtttcatttacaaagatgagacctaaaataccagccttcctaaaaatactatcacctgttaggccgctgcgtttccttgaaggttagcttccataggtcaggccttcactaatgctctgctgaagtgcttcaggaatagtgaaggagggaagtctcagaggagtggagattgggctaagtgacctctgttgctccttccaactcaacagtcatgagtcttttccccagtcagtaaaacctgttctagaattttcttaaatccttttgatcattaaatgagtttatgaccttacatttttaagaacaaatttaagcagaatttgtttctagcataaatctttttccttcaaagaagagagcttattcctcttttatcagctatgtagctgcaatacttgtatcagtaattttattttactgtttttatttcaataggtttttggggaacaggtggtgtttggttacatgaataagttcattagtggtgatttctgagattttggtgcacccatcaaccgagcagtgtacactgtacccaatgtgtagtcttttatttctcacctgcctctcaccctttcccccaagtccccaaagtccttcttatgcctttgcatcctcatagcttagctcccacttatgagtgagaacacacgatgtttggttttccattcctgagtcacttcacttagaacgatggtctacagtttcatccacgttgctggcaatgccattatttcattccttttcatggctgagtagtattccatggtgtatatcacattttctttatccactcattgatcagtgggcatttggtctggttccatatttcgcagttgcaaattgtgctgctataaacatgcatgtgtaagtatctttttcgtttaatgacttcttttcctctgagtagatacccaggagtgggattgcttattggtgattttaatttgcatgtagttgatgtatgagtacttgctgtagctagctgttaggataccctacaactcagcacttgtttttaagcaaaaagtagtaaaaactttaaagaagtgttacagttaaaattatatatacatttatattttatgtatgtataaatatatgtgtgtgtatgtgtatatatatatatacacatacacacacacagttaaaaaatatatatatatacacacacacacacacacttacaaggggtttggggcactcatcccccatgcaattgaaaatttttgtgtaagtcttgaccccctgaaaactttactaatagactgctgtttacctgaagtcttactgataacatatgtagtcaattaacacatattttgtatatgtattatatactgtattcttataataaaacaagagaaaatactaagaaaatcataaggaagagaaaatatagagaggggttggtcttactgtctcaggtgtggcaaaggtggaagaaaatccatctataaatgaactcatgttgtctgagggcttgtgtgtctgtgtgttgtgtgcacatatatatacaccccaataatatacagaatctaatgaacattttgtttttcatcttgtaggaatcatttatgtaatatgcttaaatacttagtactttgtttttgttaattttcatattatttatttgatgcatagattccatatgctcgtatatatattatgaaacaatgttaagaagaaagctatgaacctatacgcaaatttagaaccaaaacattaccaattctatggaagccacctgtatttccttcccaaacccagtctctttccgtttttcagagataaccatcattaaaaattttgtatttataattctcttgctttcttttcattttattacatatacatttatcctttcccaataaggtgtttaatggtgtttgcttttgagctttatgaaaatggttatcgtaatttaagtagtctttttgttatttttttccaatcaacattgtacctctaagagtcactcatgttgtttgggtaaactttattttattgctctttattaccatataatatgacattatgtgaatatattccaatttctttattctcctctcgatggccattttttgaatgctggcccactcactagtggtagtgaaatcaactagtggtagtgaaatcaacttaatgagtatagtggaaaagattagtgtgcatcacatgtagagggaatattgttctgttaaaaggtgtttcatgtgggtacttagtttcattgtcagatatacaaaataatgacattgttttctacaatgcttttaacaagttatccttatagtagtgggttcccattactccatatctccaccaattggaattgtcagacttctacatttttaccaaaatggcagatataaaatggtaatgctttgtggttttaatttgtatattcctccttacgaatgaagttgaccaagcttttatatattcagtaatagttacaatttcctcctttaaaaagtgctgatctttagctcattttttttagggttgatttttttttctggcagttgtattttcttatatatgtcttttttctagtgtctttctttttattgttttttcaaccatcatgacaattaatataaatatgtcttttaatcttttcttttatggttagtgttccttatttttattttctgtgatgtcattcaatggtctaaaatataagatattctatattttttcccttaggcgttttaatatctcaccttttacatttaagtctttaattcattggtatttgacttttgtgtaccgtgtagagtagaaaccctatttctttatttttttctcatttggataaacagttgacccagcactactaattaaataagtcatgtctcctcttcctctcccccaatcttagataacacttttttatctgtcatttttttccatttttgtgagtttattcctgaacatacccttccttctgtttcagtgaccgatgcaaacattgatataatactttcttaattactgtgacttcagtaagtttcagtatgtggtcactgaagctccctcaacttattctacttaaggataatcttattttttcttaagcctttgcatttccatacaaattttatttatttattttgttgttgttgttgtttgtttattttgagacaggatctctctgttgcccatgctggagtacagtggtatgatcataactcactgtggccttgaactcctgggctcaagagatctttctgcctcagcctcttgagcagctgggactacaggcatgcatcttcgcacccagctatgttttcatttttgtaagacaacgtctcactatgttgtctaggctggtcaagaccagtcttggcctcttggccttcagtgatcctcctgcctcagcctcccaaagtgccaggatttcggtcctgggccactgtgccaagccttccatataaattttagattctgcttgtgaaattattttttaaaattcttattgggatatttaattgaagctgcattgctatgaagagaactgatatgttttcagaactaattcttcccattcatatatacactgtatctctccatttacctgacttcattcatgtcttttactaatttttaaatttttccctatgaagacattgctcatcttttgttaaatttatttcaagtttctttgctgtatggaatgaatttttaaattagacttttgagtatgtactggttatattaattttgttatattgatcttgtatctagccatctttctcaagttttattatttataataatttctgtagattactttggattatctttgtgaacaaacatataatcttcaaatgtcagtataggttcttcccttttagttttaaaatcttctattttagttgcttactgagctgggtagacagtaatagtgggaatccttgtcttactcatgattctaaagagcatggttttattttattttattttcaccctctccccaagggcatgtttttaacatgtttccagtaagaataatgttttataggtgctttttaaaaataagttagggattttccctgttatatttttcatcaacagacatggagttttattaaatactttgtctgcatttttgagatagtcttattttgccctttaatttgtgcatgtgatgaattatacttgcaggttgctaaagttaaaccattcttacattctctagtaattaatcaaactttttcataatgtgctaatttttttaggacttctgtgtcattaatacatgaagatggtctataattttctttatactgtccttttctaattatggtatccagttatgcttgtttctcagaatgagttgcactgtgttacttctttttctatttttttcataatagtatattaggcatattaagaatttatattctttgtataagtttagaaagaaatatttcttgaaaatttacctgtaaaacatcttggtcttctgttttctttttggaatgatgtttaattactggtttaatttctttgatatttatagaatgactcaggcttcctctgtattctttagtgaattttgtcttgcttttgtttttctaaatggccattttgtctaagttttttttttaaaaacttgctcacaaatgttatatatcttttaaatctctgtagcttttctgtttatattccacttttatttcctattattatttacctgtttctttttcattttttctctgagtaaatcttgtagaggcttgccattttgttagtttttttcaaagaattaacctatatgatttttactatattattagtttctttttttattgttttttcttctaatttattgaagtttattctgtttacttcttaaatattttcttaaatattttcagcttcttaaatattttcagcttctcttctaagaaattgagtttctgtattttttctaaatatcattttgctaccgaacaaatttgatatacagtattttcattgtctttcaactctaaatattttaaattcctaacagtaattctttttgacctgttatcgatttagaagtgtttacaagatcccagatttgtttgctgttaaacttgttatttatttgaatttaaattacactggggtcagagaacatcatctttgtgacttctgacctttgatatttgttgagatgtgctttacagacttacaagtggttaatctttgaaaataaattattgtgtgcataaatcaatctaataaatcttgctatcttatccttttcaaatcctctatgtccactttttttctgccttacttctctaactgaaagaggaataatgacatctattgtggcaaaatttccaaggcttccctgagtttctgtcagtttgatttttatattgtgtgattcgtatcaggtaccaccaaattcagaattctcgtaacttcttgatgagttaaagttttctaacattatattgctgtcctctttctttcataatgttttttttctccctcaaagtctattagattagtttgaaataggctggtatatgtttttatttctcttttgatctccctgattgtttgtgttttagatacagctttttattattagcacagagctagattttttgtatctgagctgagcatcttttgcttttaactagaatatttagtttatgtatgttttgtgatatatttgagtctgtgtttactattttactttgtgctattttttctatattgctttatgcagcaccattttttgttttcaatcattaactttttattatattgtctgttactttggaagatatatactctatttctactctttcagtggtacccttgtaatgtttattacattttagtttaacaaaatctgctaagagcttagaacacttaacttcaaccacttcaccttcttgattcacatgatattgttgtcttgtatctcagttccatcttcaaagtttcttttttacttttaaaatttacatgaagtaaaatttacttttttgtagactcttatttgttttaacacagacatagatttatgtaacctccaccacaaacgaattacagaacaattctgttacctcaaaaagttccctcatgcggcatctttgcagtcaaaccttccccacccccatctacatcacccactgcgctgctttccgtccctatgacttagcttttccagggtgccttataaatgaaatcattcagtatgtatgaggcctttggggactggctttttacactgagcgtaatggtttgacatctatccatgttgtagcatgtatgagtggtccattcctatatcttgctaagcattttttgtttgtttgtttgtttgtttttgagatggagtctcgctgtgtcacccaggctggagtgccatggtgtgatctcagctcactgcaacctccacctcctgggttcaagcgattcttctgcctcagcctcctgagtagctgggactacaggcacccacaaccacatccagctaatttttgtatttttagtagagatggggtttcaccatattggccaggttggtctcgaactcctgacctcgtgatctgccctcctcggcctcccaaagtgctgggattacaggcgtgagccatcgcacccagcacctgctgagcatattctgtcatatgcacctattctctagtttatccattcacctgttgaagggcatttgagttgcttccagatttttagtattacaaataaagctctatggacattcacagagtaggtgtgtgtgtgtgtgtgtgtgtgtgtgtaacataaatgttcttttctctagagtggctctgctgggtcatatggcaagtgtatgttcaagtttatgacaaactgccaaagtgttttctacatcggctgtaccattttgctgtgcccaactcctagcaatgtgtgagagttccagttattccatatggtcaagaacttgatgtgtgtgtgagtgtgtgtttgtgtgtgtgtgtgttgtcactcaaatactagtatctcattttgctcttaatttacattgtcttaagggctaataatgttgaaccatcttttctgtgcttattttctgcttatctgtcttcattggttaagtttttattctgatttctagcccattttaaataggattttttttcttattgttaagtttcagagttctttgcatgttctgtatacaattcttatatatgtgagttacaaataatttctctctttttctgagttatcttttcatcttttaacagtgtctttcacagaacaaaagcttttagttttgaagaagtctaatgtatcattttttttcttttatgaatcatggttttgatgttctaagaatccattgtctaaagcaaggtcacagatattttcttctatgtttcctgtaaatattttataactttttttaattgaagtgtgtgatctattataaattaatttttgtgaattatgtacaaatgggccagggttcatagttttgcctatttatgtattctgtagcaatttgttagactatccttcctccattgaattgcctttgtgccttttttagagaccactgatcatatttgtctaggtctactttttgtacttttattcttttccactgatctgggtttctttatttttgccaagaccgtactctcttgattgactacttaattttatactaaatcttaacattggatcatgtgagtcctgcttttctttctagaaaattttaactatttcctttgtactttcgtatcaattttagaatcaatttgtctgtaactataataaatcttattaagattttgattgggattgcatttaatctgtgatcagtttggggagaagtgatatctttgccagatacaaataccacagacatgctttttctctctatttagatttgcttttatttatttcataagcattttttagctttctgcctatacattctgtacatgttttaatggattaacacctaagtgtttttttaagaaactgtcagtggtattttttatttcagtattcatgtgttcattattagtatgtacaatttatttttgtatgtttatctcatatgcaatcttgcagaaaccattagttctacgaatttttttataggttccttggcattttctacatagactattatatcatctgcaaatggagacatttttatttgtccctcttatatctacatgctttttttcttttcttgtcatattacactaacttaaacttccaggaccatgatgaatgagtggtaggagcaaatgcacttgccttgattcctgttttggaggaaagcatgtagtctttcaaaagtatagattttttcatatatgttatttatgaagttgaggaagtttccctctactcctagttttctaagagttttttttttgttttttttttttaccatgaatgggttttgaatcttgttaaatgctttttctacattaattgctatgatcgtgtggtttttcttccttactcttttaatacagtgagtggattacactgattgatatttgaatgttgaaccaactttttatccttggaataaatcccacttggtttgttattcataatggtgaattagtcatacataatgaaaaattatttttatacattgctgaattacatttgcattgactgatagattgattgactgattgacagggccttgctctgctctccaggctggagtacaaaggagtgatcatggctcacattgaaccttgacctcctgggctccagcgatcctcccacctcagccacccgagtggctaggactacaggcatgtactaccatgcctggctaattttttctctctctccttttgtttttgtaaagttggggttttattatgttgtccaggctggtctcaaactcctatcctcaagtgatcctccaccttggcctcccgaagtgttgggattacagacgtcagtgaccatgcccagcctatttacttttattttgttaaggacttttacacccatattcatagaggaatattggtctataattatttttttggtcatgttttgatatcaaagtagtattagattcataaaatgaattgagaagcgttccttctttcattttctggaagagattgtttagaataggtgatatttctttttaaaacatttggtagaattatctaatgaaatcttctgggcctgaagatttttgcagggaagtttttaaagtacaaattcaaatttttatagctatagagaatattcaaatgatctatttcatattatgtgtattgcaatcatttttgttttttttttttttaggaatttgtccatttcatctaagttgtcaaatttgtgtgtgtaggtttttcaaaggcatccttttgatttctgcagggtatgttaatgatattccctgcttcattcctattgttgataatgttcttttcagtcttgctagagattttttaaactttattgatcttttcaaagaactcgctctttgagtttctttagtttttgttgttgtgttgttgttgttaaagtcattattttcttcccttatgctataatttccttcttcctgcttgctttggactttatttggtcttttttctaggttgttggagtaggatcttttattgacttggaactattcttttctaatgtatagatttaatgctataatttttttcccagcacaactttggttgtgcccaacatttttacatgttatgtttttatttcattcagtttaatttttaaacatctgccttgagaccctccatggattatttaaaagttgtttagtttccacgtatttgaaaattttcttcttatgctgctgttactgatttctcatttgattccattgtggtcacggaacaaactgcatatgactttcattctttcaaattagttgaggtttgttttgtagttccagatgctgtctatcttggtatatgttccgtggaaactggaaaataacatatattctgctcatgttgggtggagtgttctgtaagtatcaattagatcttattggttaatggaggtgttgtgttttttatatattgttgctgatttttaaaatttagttctattaattattgagagagaaggtgttgaagtttccaactatagttgtgtatttgtctatttcttcttttcattgtatcagttttttgcttcatatattttacagctctgttttttggtggatatacacttaggattgttgtgtcttagtggcttgacccttttgtcattatttcatgctcccctttatctctggtaattttctttgttctgaaattgtctttatgtgacattaatatagatacttctgcctttttggatcagtgcttccattatgtcttttccaattttttatttttaagctgcctgtataatttatttgaaatgagattcttgtagacaccatatttttaaatccattcttctagttcttgtcttttaattggtgtgtttaggctggttacatttaatgtaattatagacatgttaaacataaatctgccatttttgtttattttttgttttctgttctttctgtttttcattgcttgtattcctttcttctttcttgtattcatttcttgttttcttgtattcctatgggttaatttatcatttttgagaattccattgatgtatttcttgtgtttgtcttgttccattttgtgctctaacagaatgccacattctgagtaatttataagaagctgaaattttattttctcagagtcctggaggctgggaagtccaacaaggggctagcatctggtgaaggccttcttgaaacattataacatggcagaagggaacacatgggtgagagagcaagagggggccaaccttgtccttttataagaaacccacatctgtgacaatgaacccactcccacaataacagcattaatctgaacacttcccattagatcccacttctcaacaccactgcattggggatccggtttccaacacaggaacttcaggagacatattcagcttttagcattctgcctctgacccccaaaattcatgtcttcacatgaaaaatgcatttgctccatctcaatagccccagaatcttaactggttccaataccacctcaaaagtccagaatctcatctagatcagatattgatgagattcaaggtacaattcttcctgaggcaaacttcttctagctgtgagattgtgaaatcgaaacaagtaatctaccttaaaatgcagtggagggaaagacatgggatagatgttcctatctcaaaagagagaaataggcaagaataaagggataactggttccaactaagtccaaaatccaatagggaaaatgttaaatcttaaagctagagaatcatttttactccatgtgtaacttttgagcatactggggtggaggttttgacctcaaagccttgggcagtcctgttttcatggttttgctgggtgtggcagttttctcaggctggggctatgtgctggtagctctacagttctggggtttgggggcagccctgtccccatggctccactaggcattgccttagtgagtactctctacagtggctttgtccccacagttctgctgggcatcaccctaatagactctctctgtggtggttccactcttgtgacatgtctcttgtgacatgtctgtgcctggatccctaggctgtctgatacatcctttgaaatctaggtggaggtagttttgtacccctgtctccaaaaatgtatacctccacagcttatgaactctgtgcaccagcagagttagcattatatggatgccaccaagcttaccacttatgccctctggagagcagcagcccagactacacttggggttacttgagtaatggctggggcagccaaggagctctgcactggaatgcagggaacagagtccttgggcagtgaacccatggaaggcatcttgggctagtctgatgaaaccattctcccctcctagagctctgagcctgtaatgggaggagcagcctcaaagatctctgaaatatcttggaggtaattctctcattgccttgatgaatagcacctggcttcctgctatccatgctaagccttttctcaaaggggacacttggcacatttttgtgttttacgtggccaggctgtgaattttccagatggttacattctgcttctcttttaatcataaattccacctttaaatattttctctcctcttgcatcttactgtatgcagttaaaggaagccatgcagattcttccatattttgcttagaaatttcttccaccatgtatcctagttcatcactcttaatttctgtcttcattaaaacccttggggatggacatagttcagtcaagttctgtataactttataggaaggatggacttgacttcagtttctaataagatatttttcattctcatgtaagacctcatcagagtggtctttactgtccatatttctgcccacattgtgatcattaatatctaagtaacctctaagaagttttacccttcatacagctcttctcttctgagccctcaccagaatcacctttaactctttgttcacagcaatgcagcctttttctagcctgctcttccagactcgtctagtctccactatccagttccaaagctgcttccacaattgtaggtatttgttatagcagtacctcactctctggtaccaattgtctttgtgctgccataaatgaatactatggtctctaatttataataaacaaaaatttattggccgcagttctgaaggctgggaagtttgagatggaggagctagcgtctggcaaggtccttcttgctacattgtaacatgatggaagtcatcacatgggcaggagagagcaagagggagctcacgttgtccttttataagaaacccaccctcatgataatgaacacactcccacagtgacagcattaattcattgagggttgtgtccccttacccatatacctcctcttaggcttcacctttcagcactgctgcattggagatcaagttttcaacatgtgaactttgaggaacacatccaaaccacaggagtatagttgagatggctctaggtgttacctactatttacataacttatcatagtctgctgctatcattattttaccggtttaagtgatagcttcctccatccttggtatttcaagtttccttcttttatcatttttggggttttttttttttttagatggagtctcactcttgtcacctaggctggagtgcagtggcatgatgtcggctcactgcaacctctgcctccccaggttcaagcgattctcctgcctcagcctcctcagtagctgggattgcaggtgcgcaccaccacgcccggctaattttttgtatttttagcagagatggccatgttggccaggctggtctcgaacttctgactgcaggtgatccacccgccttggcatcccaaagtgctgggattgcaggcgtgagccactgtgcccagcctttgggttgtttttagataactttctttagcaataagaagcctgctgatgacaaattttgtcaacttttgtatatctgagattgtcttgatctccccttcatttctgaagaatattttcattagctaaagggttctaggttgacagtttctttctttcaaccctggaaaaatgatgtgccactttcttttagtctccatttttcttgagaaatctgctgtcattctaattgcttttcccccattgttaaggtatcatttctttcaccttggtttcaagatttgtctttagttcttagaagtttgaccatgatgtgtcttggtgaggatttctttatgtttatcctctttggggtttgttcagctttttaaatatgtaggtttgtgtcttgtgccacatttgggacatttttagccattatttctctgagtattttttagcctatctttttttaacttttttattgtggccaacttagtctaatatagctaccattttttcccttcttcttctgggactctgatgacataaaatatttgatcttttgttatagccccacaggtccctgagggtttttttgtttgttgatttgtttggtctatttttgccctgttgttcagattggaaaattgctgttatgcttcctccagttcactgattctttcatctgcccgctctgttctgctgttgaacccatcaactgagttttttttttttgtcaattagattgttgtatttttcagatctaaaatttttgtttcttctttatatcttctattttctttctgagacttcctatttcatttatttcaaaagtgtttattactacacgttgaagcattttcataatgaatactttaattggaatctattgtctttttttctttcagtttgagtttttttttctgcttcttggtgtgatgagtaactgaaatctggatattatggctgttatattatgtgactctggatctcatttaaactttgtcttgtagccagctttctctgatgctgctctagtggggggagcagtttctagtgctttgtttctgatgagctggggtagaagtccagattccccacttggctggccttcattgacccttcgaagatggaggttcttcttgttaatacttggtgggtgtgggagttctggttctctactgggcctccactgatacctcagtggctggtgggagtggggttatgagtgtctcattattgctccctacttggctttcactaatactgcagaagggagcagccttgttactgctgggtgttggcaagagtcctgtctgtccactaggactcctttgacaccacaccaatgggaaggtgaagagatgcttcgttatcaccacatgggcgtgggtgtccaggtgaccatatgatttccactggtcctgcagcagaggaggatgggctttgtcagttgcctagtagtgatagacgcttccactccctagatggatgttctctttatgtttctcagtgttctctgatgctcccacactgatgaggggtacgggcttgggtggttgttacagcctggtaggagtagaagtcagggctccctactcagcttttgctggcttgggtggagtaggacacagttcttttctgtggtgttggctgcagtgagcagttttctaaaaagtgtctgtctttctaggctgctcctttctttgtcctttgtctacagagaccaggcttttgttggggtttgttttgtctgagcctcttggtgttttaggtgttgctgttgttcttaagctccaagtctgagaaatgtgaaggacaacacttttaccatgttattctgaaggttcccagccagtatgccttccttctccttttcagggtcttacgtttctaaacaatcctaggtttttagttgtgtgagtgaggagaattgctaaaatacattcactccttcctcctggaagcagaagtcctactgcttattttttaatatatcatttgttctttgatattttatacatgtattatagtctttgatcattgcaatagtcgaaattctttagacttcttgtatgttgtttcttctttctctgtactcttaaatcttgatgatttgttttcatgtgaatttgctgtgtttgtgtgtgtgtgtgtgagagagagagagagtgtgtgtgtgtgtgtgtgcacgtgcgtgcgtgttgtcagataaagagagagtgagaaagagagggggagagagagagagagagagcgttaaatcagaatgctttgttcctgagagaattggcactcttctctgacatgaggcaggcagtgctaatgggttagctgggaccagttcctccagcatccaggttctttctctaaatgtagaagtttcaggttcaagccctccactttcttgtggacataacacttggttgccagaccgtggtggtggcatttgcattagttgccaagattcaatactgtctctgtgtttgttgttaattgatcctttctcagatttctgctacattagcttacttatttgggggaggccaagcgttatgggtggggaaaccttaattctgatacttaaaatatatacatatctggaaacaaaggcatacatttgttgtcatgaatccaggttccaatctgtagcaggagagtcttcagggtatctgctttgctgtgtttgctggtgtgttggttttttaagtttcctaataaattctagttttctctattctcttattaaatgtttctactactcatgtctctgtttttctggtattgccttaattgaagagattagggagtaattatgaggctctgttgttagttttgttactgatatgtttctcaatgttctttttagggctgaaaagacagaagttttgagtgaagaccttcttcaggtaaggcggccattgacactggctcacagataccagagatatatgggaggctgaggcaggagaattgcttgaacccaggaggtggaggttgtagttagccgggatcgtgccactacactccagcctggcgatacagcgagactctgtctcaaaacaaacaaaaaacaaacaaataaaaaaacaaacaaccaaaaaaaccaaaaaactaagccatccctcgatgtggttaaaactgctccagctgctccttacgaactgttaggagagaagtttttttgtcttttacgacagtactttgcatgatgaatactgatttgggttaagctctttcaggagaggtttaaagtcatttcaccacagttagcccgagggtcctggagtctgtgatcactgcccctccagttctccagcattgaaagctgtctctcattgcagttttgatttgcatttctctggtgaccagtgatgatgagcattttttcatgtgtctgttggctgcataaatgtcttcttttgagaagtgtctgttcatatctgtcacccactttttgatggggttgtttgattttttcttgtaaatttgtttctttgttagaatggtaatcattaaaaagtcaggaaacaacaggtgctggagaggatgtggaaaataggaacacttttatgctgttggtgggactgtaaactagttcaaccattgtggaagacagtgtggtgattcctcaaggatcagaactagaaataccatttgacccagccatcccattactgggtatatacccaaaggattataaatcatgctgctataaagacacatgcacacgtatgtttattgtggcactattcacaatagcaaagacttggaaccaacccaaatgtccatcaatgatagactggattaagaaaatgtggcacatgtaagccatggaatactatgcagccataagaaaaggatgagttcatgtcctttgtagggacatgcatgaagctggaaaccatcattctgagcaaactattgcaaggacagaaaatcaaacaccacatgttctcactcataggtgggaattgaacaatgagaacacttggacacaggctggggaacatcacacaccagggcctgtcatgggatagggggaggggggagggggagggatagcattaggagatatatctaatgtaaatgacgagttaatgggtgcagcacaccaagatggcacgtgtatacatatgtaacaaacctacacattgtgcacacgtaccttagaacttaaagtataatttaaaaaacaaacaaacaaaaaaacaaagctgtctctccaggagtccttgtctccatggaaacatgagttgtgattgtccacacccacaatccctcctcccctgaccttgccctctctcagtggcaccacccgctcttctctctgcaggtggagaagcgtctggagctggtgaaacaggtgtcccacagcacgcacaagaagctcaccgcatgtctgcagggccagcaaggggcagaggctgacaagcgctccgtaagtgccctcccagccctggggagctgaaatcttgcctactgaggacaaggttcctactcctgtgacactcctggatgtagctgtttatgtagctgcttacgtgcctgagaattgactcagcagctctagctgcctattttctgttttctgtggggtaatgaccctccctactgttcttgctctttagcccagcctgaagcatcccccgccctccacaggcaagttgaggtcctctccctgtcctccccagcttggagcaactgggaagacggcaggggcgtgcttgagatcccacctctagggaagctttatccttgatcgatatctgacccctgattcagctcattcatagattgcatttgcctcaatagtatcttaagatctcatggaaaaaaagtgtattgtggttttagaggttacaagtgacctataaaggcccttgaaaattgttttcgccctaatgagacacaataaaaagagcctgctaaataaagcttctctaatgcctttgtctataacctgcattagaaataacaggcattgtataatgcgattccatttcaacagttcttggcatgaacagcctctgcaggtttaccttcctcttgaccccatccctctcagccccaccaaagattaaaagatattcttagacattcacttggctttattacaagggatatacaatctaggtttttctcctccttccttgagtttataatctacatgattggtatcatttagacattttttttttgacttgcagttattgctgatttctgcatccccttggtcccccgatgcccctcggcttatgttagcctcatttctgttggactgtcatgtaatgtgccacaatacttcttcccagctcctgccgcagtgcaaaaacccactctacttgtcctacgagtcatttctttttttttttttttccaagccctggtttcttctttcttaatattcccagcaggaatcatttgtgtgtgtataaataaaactttcacagctctgaaaaatatctatagaaataattctgcatgtatcaggaattcagcaagaggaactgtctaaagggagagtttgcaaaatgactttgggcatgaaacccttttatcaaacccacatctaatgggggactccaggaacggttccggatgggggtgctggagccaagcctgcctttgatctgtgtcttttttttttttttttttttgctctaagaagcactatttttaaaataactggtccaaagtacagtatgttttggtatcgggagtatcatctgaatgctaccaccagaggcttgaattcggcctttggtgttggtaggcggattagtactaacattatttttctgggatcagatgaatttacctggattggtggagttttcattggattgagagtcttacgtattatatcagtaaggatacatttggatccttgagtgatctgaagtatagggcactgatagaagatttgaggtatggcaaagccagcagatcaggagatgattgccaaggagagataattattcaccctccccaagagaaggggacaggccacatcacccagagggccacaggggaagctctagggttggtcaggaggtaaaggaggggactgtgggccagagcctttgttgtggtgtctgcagcagatataggattgattagtttgaattattacggacgatttctagttgtctgacctaccagtcaagggtgattagggcagatgaacagtggcctgcggtgtgacagccccttagaggaggttgttgaagtgtgagctccagattggtttgcatttaaaaagcatgctgtgagtgagttgtttactatttctaggaattgcctagcctgggaggggcagtccctctagggtcagcaagggcccaagatgttgtcagagcatctgaatacagaaaataaaacacatggttaataactacactgcttcctagagacttgagaaaaaggcacttaattgcctcacttaacaagattctgatgtagccagttccaaggtttattcagcagctttgggtcagcagctatgtgacgcttgggcctccacttacaactgtaatgtggctgctccagctccacgcatcacatcttcacataaccatatcacaggcaggaagtgggagattgataagaccatgaattcatttcatttatgtttctctagctgcaagggaggctgagaaggtgaatatgtgtccaagataaatgggtttgctatgactggccatgattcaccagcgaggacgtacactatctggcttctcttactagagaagacacacagtggttgttaccaggctctgaaggctgcagtcacatgcatgcagtgataaacgtgtaaactgggagaagtccgcagtggaagtaggtgcccaagcatgtataggtcagtgatttcactgcatggatttatttatttatttatttatttatttattttgagacagagtctcactctgtcaccaggctggagtgcagtggcgcaatctcggctcactgcaacctccacctcccaggttcaagtgattctcccacctcagcctactgggtagctgggactacaggtgtgcgccaccatgcccagctaatttttgtatttttagtagagacagggtttcaccatgttggccaggatggtcttgatctcttgacctcgtgatctgcccacctaggcctcccaaagtgctgggattacaggtgtgagccactgtgcccagcctcactgcatggattttaagtgcttgattttgtcaatgatttcttatgctgattcatctttgcttgtcatcatatgactgaataaatggtctgaaagtcaaagagccatttaaaataggaaacaatcaaagaactgtgggaaaaaaatttccaaactcaatttttttcagtttttctctgaacacattaagagatgtaataggaaacgtgacacttataaatcacctcaaatactgaaatgtatatccagttctttgtgatgattaagtagggagatatgtcaagatcggagcaatgggtgaaaaggaaaagaaataaaatgaaaaggatcaggtaaagggaaggtggggtgggagggagggagtgaatgaacagacactgtctcgggaattgaatgttaagggagggtccagagatggacaatcacacgggagtgtgggtcatagagtctcaggatcaggagagactttatggggatccatgcaatattctgctttttatttgagcacatgtaagttgctgcttgagcacatgtaagttgctacttgagcacatgtaagttgctacttgagtacgtgtaagttgctttttgttatttctcttttaacaagctcagtagctctttagtcatgtgttccaactcctgaacttttgtcataccacttttaaaagttttgccctgaaagctgtggctgccagccagatgtgggtaggcataaaaatcggattttgttgccattatctcagtgaccagagagaacattattgtcttgtgggtactgagtaaaactggattccttatgtggaatgaagaatagaaagcatatgaattacctttccatgttgccatctttttttatttttatttttatttttttttgagacagagccttgctctgtcgcccaggctggagcgcagtggcaccatttcgactcactgcaacctctgcctcccgggttcaaacaattctcctgcctcagcctcctgagtagctgagattacagacgcccacctccacgcccagataattttggtatttttagtagagatggggtttcaccatgttggccaggctggtcttgaactcctgacccatgatctgcccgcctcagcctcccaaagtgttgggattacaggcgtgagccaccacacccggcctccatgttgccatctttagtcctggataataactggttagttcctaggtttttgagactcttaatataatgaagatgtttagttttttgaagtccttgcatttctcattaggaagtcatacccaacaaataaagtgctaccgtgtggaagtgtttctccaccttattcagcaaatatttagaaagcaacaagtctgccacgcaaggcggtgtgtatgccaagtgctgagccagctgagcaggatttctgtgctgcagaagctcaccacccagggggaggcaagcatcatactcacagtgcattcgctgctcagaccgtgtcttagtgccaagaagaagtgcttgctaggaattaaatggtgggaggtttccataaggaagtggccgttaaggacaggtgaaaggtagcagcaccaaaaggggtaaacacacttctcagataagaggacaagatgtgccaggttccgagagacaggagaaagtttggctttttttttttttttttttttttaattgagatggagtttcgctcttgtcacccaggctggagtgcaatggtacaatctcggctcactgcagcctctgcctcccgggttcaagcaattctcctgcctcagcctcccaagtagctgagattacaggcacctgccaccatgcccagctaacttttgtatttttagtagagacagggtttcaccatgttggccaggctggtatcaaactcctgacctcaggtgatctacttgcctcagcctcccaaagtgctggaattacaggtgtgagccaccacacccggccaagtttggcatttttgagaaacataaaggtggccagagtgaccagactgtagcgaatggggaagacgtgacatggggcgggactgcagaggatgggatcacgccttacaggaggacatggtgagggtttggactttatccctaagagcagaggaaagccagcattttaacagagggagacatgatcagatatgttcaaaattgtatgaataaaggactcatgggtggggccatggtagaagtgagaggccagttacacagagatgggaacaatttcagtgagatgcaacgaggacctgaagatggagaaaaatcggcgtccatggtagatcctggagggagagtatcagggcttggtaactgagtggatgtgggcgtatgaagaagagagagaggtctcatggtctcaaccccaagtgactgttgaatccatgggagctgctgtgatcacctggggagaaaatgcagggtgagaagacatatggcttttgaatcaggaaccctgggaactgcagcatttcctgctctaccaggaggaggacccagcaaagagggcagagcagtagagaatggtactgtaaatccacgcacttgctcctctaaatcccagacaccattctttattctttcctttccatacccgccatgtccaggctgtcagtaagccctgctgactcttcctccaaagaatttccatttggcttcaacatttaccaccctagtctaagcagctgtcagctctttctgaacacagtggctcctatcacatcttccaccccaaacccttccctcctccttcctcttcccttctctgcaagcgcaggagccaatgtttaaattggaaatccagtaactcactctcctgcctaatcctgctccgggattccctttgtagaataaaatctgaactccttatcttggcccttggaacactatgatgtgtcttctacctgcatctctgagcttagctctgggcttccttcccctctgtcatcattcttcagctgtgctcacctggtactgagcatgcccagctcacactcctcttgggccattgtgcttgctctatcctccgcagggaatgctcttacccagcatttcaagccagcaccctgttcggttctcagctcagatgtcaccttttcaggaggctttcttgaccacctaatgtgtctgcttcctccctcaccctaatcccatctccctattttattttcttcatagcacatattagtatctgaaatcactgtgatcatttatttccatcattgtgatgggagcagggatcttgtgtccccataagctccgttctccgtgcctaaaaaagagcctgccccagcagggcaatggtacaagtagatgtgtgtcatgaatggatggtctgtgaatattttaggcacagaacttgcctaccacactagcatgcccttccttttctgtaacaggcaattctgaggttaagctctggaatctgacgacccaagggtgaagcccagttctgtcacttcctaatttaacctgagcttgggcaagttaattacctcataagccttagcttcttcatttggaaaatggtaagaatcataataattccctacccagcagggttgtttgagaggtcagtgaggtaaagcacgtacatgccttgtgcaatgttaacttaagtaaatattaaagaagtgtaacctgatgctgttagcagtggcccgctattagactggagtggctgttgagaaccactgagacccaagcatcaagccttggctgtgtgtctgtttggggctgaaccacagaagagctggttgcctggggctggaattagaggacagtagacaagaattttccaagatagggaatatatgagagagagagagagagagagagagagagagagagagagagaggagagagagagagagtgtgtgtgtgtgtgtgtgtgtgtgtgtgtgtgtgtgtgtgtgtgtttggaggaatggagtggatattagaatgaggcttattgtctgggtcatcctacaaactgtgttgcttgtgcccaagatagttttagagagaatagtcatctcagaaatgtcagattgactatatcgaaactctgggacagtctgtctttccttcccttaattctcaaggttctatctgcattctagagctagggagaaaaattatttcagtagctcctctttggctctgaaaatcactggcagcatgaagtttgctaagatctttttacctgggcactaatatttaccagggattgggactggctttgtcagtgtggatccttggtactggagggaaaaagattttgggagcttttctagatttttgagcaatttaattcttctaagactggatatccttttaaaaaatttttaattaatttatttcaataggtttttggggaacaggtggtgttggttacatgagtaagttctttagtggtgatttctgatattttggtgcacccatcacctgagtagtgtacactgtacccaatgtgtaatcttttatccctcaccctcctcccaccctttcccctgagtccccagagtccattgtatcattcttatgcctctgtagaagactggatatcattatacttgaaatgggggcgaccaaagtttgagggagagagcaaacagtatcttagttagaggcaatcttaggttatatgagattgctacaatgcctggcatctcttgagcagataaagtcccttcaccttagagaatctttttagaaagagaaatcatttgtagtctgttgtgcgttacagtccattaacttcttcttacgtactgtctttgattatggggttgctaacgcatttcttcctttctcttgtcatttggtggcttccttgtaatttcttgattcttttgttttttttctttttaatttgagacagtctcgttctgtcacccaggctggagtgcagtggtgccatctcggctcactgcaacctctgcctcccaggttcaagcgattctcctgcctcagcctcccgagtagctgggattacaggtgcatgccaccatgcctggctcattttttgtatttttagtagagatggggcttcaccatgttagccaggatggtctcaatctcttgacctcatgatctgcccacgttggcctcccaaagctctgggattacaggcgtgagccacggtgcccggccaatttcttgattcttaaagcatttacacaaataaaaactcatgttgattttcaccagcttacccccaccttggaatccaagctctcaaattcaccttaacatctctcctcttagagtgacagttacaccattggtagggtacttgagtaaatacattttgtcatcttcattcaatgatctgtgtaaccattaaaataaaagaacaagacagttccataggtagtgataggaaatgatatgaaaggtatctatctctatgtgaaaaggaaagcaaggcacagagtggtgtgtatatttagtatgctaacgtggggagaaatactaaaagtagacgcacacacatgtatgtataattgaatctgcttagaatatttatgaaaggatacacaaaatctggtcactattagggtctttggtgaggggaatgaagtggttgagggatgagtgagtgtgggagggactttttactataaatcctctagcatcttttagttttatttatttatttatttttgagacggagtctcactctgtcacccaggctgaagtgcagtggcacaatctcagctcactgcaacctctgcctcccaggttctagcaattctcctgcctcagcctcccaagtagctgggactacaggggcgtgccaccacacttggctaatttttttttttttttttgtatttttagaagagacggggtttcaccatattggccaggctggtctcaaactcctgacctcatgatctgcccgcctcagcctcccaaagtgctgggattactggcaaattaattcttttcctataatagatatgatagagaatgagatagggcaggagggagaggttatgctccttgttaaaattaaaaagcatatcccttaagaattcacttaattctgtcctctctgctacctaagaggatgtcaaaatcattagtgcaggtgttaaatgactcaaaatgatgagaaaatgtagcttccttggctcaggagcagggtgcctccagccctatagcttcaaactgtgttttccagtctgcactttgcagaacagttgcctggctgtcccctctccatcctccctccaaaagtccgatcaacctcatgttcctccagtggccggtcttgtcctgttgatcttgaccttcgttcatttggtcccccttgggcacagttttctgctccactcactgacaggataatctgactagtctttttccatatttggaaaaactctacttaccttctggtagatgtatttcttcaaaggatgtcaactcttggactatcagaagtcccctttactataggcaaatcctctcttctttgtccaatttcagaaagattcagaaatgctgaagtcttgtcctgatggcaggtcatgggactgtgaatgtttatcacaaaccagaatggtctttttatgtgagctcatcaatactatgatcgtaccatctgacattcaagacgaagcatcttcactgacttgtcactgaggtattgtagacacttgcagatcaaaccaggtttctcaaccatggcactattgccattttgagcctagtaattctttgttggaggagactgttctgtgccttgtaggatgtttagcaacatccctggcctctacccatcagatgccaatagcatctcccatgctgtgccaatcagaaatgtctccagatgttgccaaatgaccccaggaggacaaaaatcacccctggttgagaaccaataccttaagttatgccctctctgtgaggctacaactggaatattatgcctgcttctctgaaaaacagactctgtttgtctacacttacataacacttctgtgaccacatgtgtggggggattttctccacacaccaagcagttccccaactctctgaacaccaggtgtatgtcttgcaatttattctgacactgtatacctggagttggtgtcagatcccgcaggttaagggctcagtcctacaagactgcccctacttaagatgtcaattgcaaatccagccttctggtatttctcaacaaccagctataaattaggggtcccacaactcccctcctcaggtttgataatttgctaaaatggctcgaagaactcagggaaacactttagttgtatttatcagttaggatattataaaggatacaaatgaacagccagatgaaaagagtaaacttagggcaaagtatgatgatgtttattatttatcttcaccattagaagtaagttctgtggctgggtgtggtggttaacacctgcaatcccagcactttgggaggccaaagcaggaggattgcttgagccgaggagttcaagaccagcttgggaaacatagtgagacaccatctctacaaaaaatttagaaataaaattagccaggcatgggggtgcatgcctgtagttctagctgctcgggaagctgaggcaggaggattgcttgggcttaggagctcgaggcttcagtgagctatgattgcaacactgtgctctagcctgggagatagggccagaccttgtatcaaaaaacaaaacaaaacaaacaaaaaaaacagaaaaaaaggaaagaagaagaaaagagaaaagaaaaatgttctatgagagcagtgtctagttttgtttatcactggtttggtgcctgccctccataaatattggattagtaaatgaattataagtggaaacgctctatgtgttaacaccaggaggctctgggctgggtgtagttcagtcactttctttttgaagaactacctttgtagctacgtagactggaagacctgagaaggtgctagtggttcttaccttgtttttgttctgtctgtgtgtactggctggtcttagttcagaaaggagagagctctttgatatttagcctggggaacggatcatgctaaactcctatcacagcttgtctctccctccctgtaacataaaatgtagcatttaaaagtgtacagtggttttaacagttagtctatttaccaccattatctagttccagaacgtttccatcatccccaaagggaaccccatacccattaagcagtccttccctattttactcacccctgcagccctgtgacaagcactaatctactttctgtctctgtgaatttgcttattctggatatttcattaaatagatttatataatatgtgtccttttgtgtctaggttatttcacttagcatgatgtcttcaagattcatctgtgttgtaccatgcagcattccctttttcatggctgcataatgttccattttatggatataccacattttgtctgtccatttattcattggtggacatttgagttgttcccaccttttggcctttgtgaatagtgttgctcttcacatttgtgtacctcttttttgaacatctgttttcagttactttggatatatacccaggagtggaattgctgtgccatgtgataattctgcttaacttattgagatactaagtacaccttcacagtgctgcaccagtttaaacatctactagtaatgcatgaaggtttatgctcaccaatccttattttttttttgctttgttaagcattaatattattatagccatcttagtgagtgtaaagtgaggtcttgattggggttttcctaatgactaatgaggttaattatcttttcatgtgctctttggccatctatcttttttggagtgtgtctttattttcatgcttactctttctgggttataattgcatgtgaacacttttctgtctcttttttgaccatagctgcctcatttctttttttttttttttttttttggagatggagtttcactcttgtggcccaggctggagtgcagtggcacaatctcggctcactgcaacctctgcctcccgggttcaagccattctgctgcctcagcctcccaagtagctggaattacaggcatgcaccaccacacccagttaatttttatgttattagtagagacgggctttcaccatgttggccaggtcggtctcgaactcctgacctcaggtgatccacccgcctcggcctctgcctcatgtaaagtgctgggattacaggtgtgagccaccacgcccagccactgcctcatttttaaaataaggctaatacactccttaagagacatattatttttggaaattaaggcattgctcaaatctttgttaacatcattttaaatttttctcatttttccttcttgccatcctacctcattttaaaatgcagcatgtaagccttaggcttatttcccaaagtggcaaatataattcagttctcgttttctgaattttgacatctctaagtctaacccatcatggtgcactatgaatttctatgtttaaacctattttaaagttagcttgtttcatagttaatataataccttggcaagtatttgactttttgctattttagattcaacagatgaatatggaaagtagctttcattacagcatttgctttcttttcagaaaaagttgcctttgacaacactggctcagtgtctgatggaggggtcagctatcctgggagatgacacacttcttgggtaaggtgacaccttgcgtgagtttggtgccaaatctaagtaagtccccatccgtgaaaaggggactagaccctctcagggaagcacctgaattctcactggggactttagtggaaaaaaggaaaatgttaccagtaggaaatcagaactcttggctctaaagtcatattgtctgtgcggtgaggcaaggcccaagtggagagattaacatgaaactgatgaaggacaattgaaatccctagggccctagcagaagcaaatatgaaacctgtcaattcaaatgtcagaacttacgagattctcagaaaagcagcctttgccgatgttgagctcacaacaaaacaaactgaaaatagaatcgtcatgagagagcatcagcagacacaatcagtagaagagtcagtaccctgagaacgaaaaataatagaactatatggaagaaaatataacaattatttaaatggaaattttaaaattaaaaaacagaatccttgacaagagaatcaaacaatattaaaaaagaataggcgggattgaaggcaaaccaaagagaactttccaaaattatgctgaaaattttcaatgatctttagtcaaaagaaactcaagattatacacaaataaataattgctgaacttgaaaacagatgtagagccgccacccagaatgaagggaatgaagtgcagagataaggaggtaggcattcttaaactgagaaacatgggtgatagaatgcaaaagcttaacattccatctagtgggaattcctgaggaagaaaatagggagaaaggtaagtttgtggttgaatttttcttttccagatttaaagaaaaacatgtctttggatttaaggagcacaaaatgatttgattgagatcaacaagaaaaaaatgcatccctggacatattgtagtaagaccacagattatcaacaaaaaatagaaaaatgtaaaattgaccagagggaaaaaagatcattactataaaatagcaattaaactgttaacaaactatgtattcgtcagccacaatgaatgccagaagataatggagtaatatcttcaagtattgagcgaaaatgtaagaaacctagtattctatgataaaatagggaagagtaaggatattttcaggcagatttgaagaagatactacctgcatattctcactgaaaggactagttaaggctacatgaaatagattacatctctttcacagaaacagaagaaagatgagaagtacaagtaccaaggtaggaaaaagattgtgttgtaggggaggaaacttttttttttttttttttcctctctctaaacatcttaggttctttggttgggccctgaaagttagattgacaaaaggtagattaacaggagaaaagcaaataaattttattaaaatgtgtagtacatacacatggaagaactcagggatgagtagatcaaaggatagaacatgggcttatgtagccttttttttttttttttttttgagatagattcttgctctgtcacccaggctggagtgcaatgacgcaatctcagctcactgcaacctctgcatcccgggtgcaagggattctgcctccacctcccgagtagctgggattataggcgggtgccaccacgccgggctaatttttgtatatttagtagagacagggtttcaccatgctggccagactggtcatgaactcctgacctcaagtgatccaccctcctcggcctcccaaagtactgggattacaggagtgcttatgtagcattttaacaaagaatgatatttttttagagaagtgacaagacaaaagagaaggacttttacgtttctgtggtggcagaatcagtatttcaagctcctgtattgtttgaaaggaggataaaggtattacatttaaatttaacatccaaaaaataaaaaaataaaataaatttagtgtcaaatatgcatgttataaaactaagactaaccacaaaaagaatagaaataggatatataactttcaaactaacaaaggatgaaaaggaaaataaaaaaaaatacatggaagggactacaagagaaaaaagtaaccaaaaaaaaaaaaaaaccacataataattggaaaacagaaaatgagggtggtagcaatcattgcatatatctctgcaatcataggagatgtaaatggaataaactcaactgttcaaagaaaatttcaggttgacagacatgaaatcctgttgtatggtatttccaagagtcatgcctataatataatgacagagtaacgttggaaataaagatgacagattgaacatgcatctgattttctctccttccaaaatccgctaaaactacaatatggagatttttttttttccttaaaagacataaacccacaatggcaggaaaaagcagacaacagcaacacagttttgtgagctgtaaagcatatgaatgactgggaactaacttggcaagtccccaaaagctgactcccaagccagaagtagatatgcaaagatcccatgtaaattacatcacgtaatgcttacagtgctcaagaattggcaccagggatctctggaatagtgggtctttgggggtggagtgggtgattaaactcacgaatgtggttgaaagcttttcagttaccacttggatcactaaactctgccccaaccacatgtctaggaacctgtcatcccccgactcccgcctgagcagaattctctagaggggataagagagcatctctagaatgggggactcccggtgcagtggagtgtatgggtaccattcagtaaagaagaggctcgagtgatctaatgtgtactggatgtggatgctaatactccacagccgtcttcttccactcatgcagccccccaggactttaccctctaagcaggaaattagaagaggtttctcaggagaatcaggttagtccaaaaggaaggacctaaagatctgaggatgttggagggggtcagtgcctcaataagtgacgcaaccacgtctttctacagatgaattcacatactctgaactttttagtctccactcttgaatatagagaggcaccaaagatcatcagacatctgaggaaagtctctaacctgaaacctggagaccaaaacaattgggtggatacaatgcagcttggaagaaacagattgtgtaggggaggaaaaaaggttaggagaacaatcacttgtgttttcaaatggtaagggaagataacatgtccatgaaatgaaaaacaggatgttaatacaaaatatttatgggaaagaaatagccagagatcaaaagcaagcttgtagaaatgagaaaatatgatagaagatatgaaattctcaggaggttgggaagataaatatgaagaaatcctcatacactcagacaatagaacacacagacagtagaaaaaattagaaaattaaaaaattagaaaattttagaaaattagaaaaaattggaaaattagaggatcaatccaggaagtcttatgcccgaaaaacaggagttcttagaaaagaagaggaagaaataataataaataatccaacagcatattccggatcttgaggacatgagtttctatactgaaaaggcccattgagctccaatacaatgggaagaattaagcgtatgccacagagctcaccatcatgtatactggtgacaaagagtctacaaccttctagagagaaaacatgtcacatacaaaggatcagaaatgcgaatgcttccagactgagcaaaagcagcaatggaagaaagaaggttattaagcagtgcctttaaaattctgaaggaaaccatgctcagcctaggagttcaatattctgcccaagtttcaatcaacgagagggcagaggagaataccgtgacatacgtggcctcagaaattgacttcccacctattctttctcagcaagctaaagcaagacagcaagatgtgtccttggtgaggaagtgaccaaaagaaaggtagactcaagataacagaatgtccaatacaagacagaggaagagaatcccagggaatggtgaaggaagattccaggaagacagatgtgccttagggatacaggaaaactcaatccgcattgagacaggtccaggagggattaattcaagaagatgaaattcatttacatgatgtgtggttcaatattttttggtaatatttttattttaatatataacagaagaaaaaaattagcacacaaaactcataaatgtgatgtttatcactgcttaggatgaggtttaatttttttttaatcaagttaagcaaattttggttcaatatcttaacagacaaactaggaaagtggcagagtattttgaattcgattgggtacgtagaaaacaagcaagccaaaacaaggcaattattaactccagggagaacaaataagtgtgcagggaaaccagtaattatagtatactacccagattaactccaaataatatggagtcaaagtgtaatataaataataagcatttattaatatgaataaagggagggaggggaaatggaaacggaaacatagctaaattctcattttctgtaatgttaatagctaatatttaaatttttttaattaagtagtattagaaatatggaataaataccagaaaatcagatataagacaccattaagctgggtgcagtggctcacgcctgtaatcctaacactttgggaggccgaggcaggtggattacctgggctcacgcctgtaatcctaacactttgggaggccgaggcaggtggattacctgaggtccagagttcaagactagcctggccaacatggtgaaaccctgtctctactaaaaatataaaaaattagctgggtgcagtggtgcacacctgtaatcccagccactcgggaggctgaagcaagagaattgcttgcacccgggaggtggagtttgtggtgagccaagtacgcgtcactgcactccagcctgggtgatagagtgagattttgtctcaaaaaaaaaaaaaaaaaaaaaaggcaccattaaagacatacaaagataaaagcacacctgggcactgacatttgtagcagataggaaaaagagtgaaaatctgccttcacacacgtgtgtatatgaagttcctacaaataaattcaaataaatagatcctaatacaaaaatagccaaggaatatgaacaggcacttcatgggagagggatattaagtcttactagcagtcaaggaatgtaaattaaaaccagaaggagataataatttgtatccaccagtttaacagaaattaagacacctaccaggaccaagggttggcaagggcatagggcaatgggaactcccatttgtgctagtgaaatttccaaacatgcacaaagagactgcacaagcatatttactgaagcgctgcatgtaatagccaaaaactcttgtttgtgggacagcttaacataatggtggtatattcaaagaacgaaattctccattgcaaaatgatctgattccgcatgtaccaacatgggtaagctccagacataatgatagagtaaaaaagcaaggctgcctgtagtcccagcactttgggaggccgaggtgggtggatcacctgaggtcaggagttcgagaccagtctggccaacatggtgaaaccccatgtctactaaaaatacaaaaaattagccgggtgtggtggcagcctcctgtaatcccagctactcaggaggctgaggcaggagaatggcttgaacccaggaggcggaggttgcagtgagccaagatcgtgccactgtactccagcctaggcaacaagagtgaaactccatctcaagaaaaaaaaaaaaaaacctcaaaaaaaaaatccaaacaaaaaaagcaagtagcatcaggatatgctcagtataaaaccatgcatgtagactgaactaagcaaagcagcagtattatatattgtatggggacacatacatgtagagtaaaaatgtgaaaatctgaacaggaaaggaatatcctcacagtaaaaaggcagttacctctgctcatacgtttgttgacttgtaaaagcttttttgtttgtttatgtgtttttgagacagggtctcgctctgtcaccccggctggagtgcagtggcactatctaggctcactacagcctctgcctcccaggtacaagtgattctcgtgcctcagcctccagagaagctgggtctacaggcatgtaccaccatgcccagctgagtttgatatttttagtagaggcggggtttcaccatgttgcccaggctggtttgtaataactttttacttgagttttagttaaaatgggtaccagacaatgggagaatggcctgtgtacaatttgggtagaatttaacatctttgaaatagtatattgtgtcatctgggaagatggcatgactttctactcattcaggtcttctgtcgtttgctcattattaatcaacttttggattttttttcattggataattgtctatatatccatgtactaattacattttcgtggcttaggagtcagggctttctttctatcaggacctattgaaattgagcttttgctttgtatttgaagatgatgtttttttagcgggcagattttagctatccaatgttctcctcagagatagaagcatgtgtttataggcatgtgtgtctgttttctctctcatgtttccccacatttccccttgtgccccaggcacacaatgagtggcaccttttggaagaattgattatttcagaaatgcagagagctggaacaggttggcccaggggaagccatggagatcagccagcttattaacactgacttgtgaaagtttacaagtgagccaggaggtgaggggagggtaacgccagtgaaatgttgtcttcaagagtattcactatttctttcccccttggattacaggaagatgctgaaactctgtggagagacggaggacaagctggctcaggagctgatacattttgagttgcaagtagagagagacgtgattgagcccctgtttttgctggcggaggtaagcagcaggagtgaggccaggcctgaaagagcaaggaggtaccgaacaggagcccctcaatcattctgtttccagcattctacttctttcccttaaccttctccccaacattgtttttcatcagggattcttacctaaccacatggtcaagattcccaaatatgtccttttagcatttgctaccccttctcctacccattctcttccctgcaggcattcctagaagtaaggtggaaagctggcagcttacccgcttccccacccacagcctcgactgccttcatccccaccttccacccatctcaagtcttcagtgctgtgaacagcagccactccttactaggattctgggggcccaggcctcctgcagttttatgttttttttttgagatggagtcttgctctgtcacccaggctggagtgcagtggtacgatcatggttcactgcaacctccgcctcccaggttcaagtgattctcctgtctcaagcctcccaagtagctgggattataggcacccaccaccatgcccatttaattattatatttttagtagagacggggtttcaccatgttggccaggctggtctcgaactcctgacctcaggcgatccacccgccttggcctcccaaagtgctgggattataggcgtgagccatcgtgcccagctgcagtgtatgtttatatgggtcccttgtctttggactttaaaggacactcaattaaactattttattaaaaagcaaccttaatgcctatgtgaaaactttgctagcttcagccaagtgaaagcttctcacgggagataggaaatgcttggggagctttgaaccctgaatccctctcagttgtttttaattcgtcatctgttaatagattgagcatctcaaacctgaaacaatccgaaatctgaaatattttgagcaccaacatgattcttaaaggaaatgctcattagagcattttggatttcacatattcggatttgagatgctcaaccggtaaatatgatgcaaatattccaaaatcccaaaaactcccaatcccaaatatttctggtcccaagcatttcagataagggacactccatctatataaaatctaaccagcactatcccctagaactctgtattagtcagggttctccagagagagagaaccaacaggatatatgagaggggtttctcccctattaggggaagttgggattctcccctattaggggaagttggctcacataatcacagagggggagaggtcccatgataagccatctgtaagctggagaaccagagaagccagtagcatggctcagtccagaaacctcagaacccgaaactcagtccaggaacctcagaagctgatcgtgcagccccgaatatgaggtggaaagccagagagacccccattaaatgtcaaagaacctggagtctgatgaggggaaaaggcatctcactacgggagggagggagagagagagcagagagagaatcctccttcttccacctgtgtgtttcagctaattggatggtaccgctccattgtgggtgggtctttctcccagcctgctgactcacacattggtctcttttggaaacaccctctcagctacacccggaaaaatacgtcactagcctttgaggcatccatcagtccagccaagttgacacctaaaattaaccctcgcagactccctacaatgatggaaatattctcaatctgtgccgtttgatagccactgcccttaagtggtttttgagcaccagtgcgattcaggaactcaattttttagtttctttaattttcgttaatttaaatttagaatttcatagctacgtgcggttagaggctactgtattaaactgccttgccctagaccctgtctggcttcctctctgaaccacaacgagcacctccacatcccctgacactctctctgggacagaggtatgggccggtaattacttatggacctgaaactattcaaggagaaaatcgtggatgaagttctttgggattgaccagctctcagcttctcaagtcatctcctcgcttggagcattcacgaggtcccctctgtgcctcaaaaggagggtcccgggtctggccaaagcctaaagcaaaccaaggagcaagtccgttgtgggtgctgacagtcacttggctcaagcaagatacccagtggccctccagcttagcttcggagctgggtggtgactcaggttgcctggggacagttacacttctccttcctactggaagttgttacacgcagaacattactcatccctgctcgggagagtgaatagaaagcacttcagagaacattggattctcctcgaattttttccttatataaaaaccgcagcccgagatgattttagttcaattttcggccaattttcgttttgcattctcacatcctgccctacttttgctgggcccggaaccaaaatcctgcactgggatgttcagtgaagccatttttagaatgaaaaaatataaaaagagcatctacatacaaccaaaatggaagaactcgtagccgagaaaagccatgatggcaatgtttattcattattgactggaaaagtcttactttatttctataaatataaacatttgcttcctttctttttataaatatagaatctgtatcctagatgcagccatagcctctccacgctcttcctccttcagctgtccattttgcctcaggtctgtgtcagacatgactgcgtggctcccttcatttctccccacttttggcccttctggaagtaaagagggatgtggttgagccctggtttttttttggcagggcgggagttgggggcaaggtgagggcaggaaagtggccaggcctgcatgagcagagaagcacaggacctgtgagatggtctggcttgatggagagcctggctggtgtccagcaaagatggagcagagtttagctcaggaaagggcatcaataatttcatctgatgttggtcaaagggtacaaagtctcccttaagcaagatgagtaaattctggagacctgatgtgtagcactgtgtgacgatggttaatgatactgtattgtagacttgaaatttgctaagaggatagatcttcagcgtactcaccatcaaaaaaagaaaatagaaactatgggatgtgatggatatgttaattagcctgagtgtagtaatgatttcacaatgtgtgcatatgaaaccattaaaccgtacacctgaaatatatacaattcctattagttagacctcagtaacacaaaagggaaaaaaggatttcatctgaaaataaggattgcgagaccgctagtaaacttgttgggtgacttccaatagttctttaagaatagttcttcttttttttttttttttgagacggagtctcgctctgtcacacaggctggagtggagtggtgtgatctcggctcactgcaacctttgcctcctgggttcaagtgattcttctgcctcagactcccgagtaactggaattacaggcgcatgccaccacatctggttaatttttgtatttttagtagagtcggagtttcgccatattggccaggctggtctcgaactcctgacctcaggtgatccacctgccttggcctcccaaagtgctgggattagaggcatgagccaccgcgcctggccaggaatggttcctaaagaatttatcttgagcttcagtttaattgtatcttttatgttgtgtaaccacaggtggaaatcccaaatattcaaaagcagaggaaacacttagccaagttggtgctggacatggattcctcacgaaccaggtagaatctctttactttcttttttgcttctttgaagggacagtgatcatattttgggcgggtgggttttaagtaggcaattgtgttttcattcaccaagtttttctggacacctaacgtgtaccaggcactggaggtagtcacagtgaactcgagacactgggtccctgttctcatgaaggctgcagttgagttttggaggtagacactaggcaagtgaagaaacaagacagttctagaaagatatgtcatataaaaaatgtggccgggtgcagtggctcacacctgtaacccagcactttgggaggccaaggcgggcggatcacaaggtcaagagatcgagaccatcctggctaacatggtgaaaccctgtctctactaaaaatacaaaaaaattagccgggcatggtggcgggtgcctgtagtcccagctacttgggaggctgaggcaggagaatggtgtgaaccggggaggcggagcttgcagtgagccgagatcatgccactgcattccagcctgggcgacagagcaagactccatctcaaaaaaaaaaaaaaaaaaagtaacacagggtagttttggaaggcgatgatggagaaagggagcaacagcattaaggataaaagagaaaaagcttttttgaggtgggtcattttggtcttagacttagatgatgagaaggtggcagccttacagagatctggtgcaaagcatctatggcagagggcacagcaaatgcaaaggcctcttcaaggcacagaaggaaggtcggcatggctggggcggaaggagcaaagggaagagaagtaggaggtgagagccaggaggtaggatggttgctatgtcctgtccattacaggaaatttcgcattttggagactcactcaccttttcctgaagctgatggtgtaggtgtctgctttctgtagcctttctcttaacttgagtcctttcagagagcagtcaagtacctgtagggctgttcttccacacccatcttccagagtccaccagaaaattcctgtagtagcaggcgggtgccaaaggccctgagacagcattgcctgtggctgtcagagcaggaattgtgcacatatgtccttttattttttacagtgggatatgtgtatataagttgaaaaaggcaggtgcgtgagtattaatatggaaagaactatttggttctaccttaggtttttcgtagaccaactttatttttttatttaatgtattatttatttatttatttttgagatgaagatttgctcttgtcacccaggctggagtgcagtggcgcggtctctgctcactgcaacctccgcctcccaggttcaagtggttctcctgcctcagcctcctgagtggctgggattacaggcacctgccaccacgctcagctaatttttgtatttttagtatacacagggttccgccacgttggccaggctgttcacgaactcctgacttcaagtgatctgcccacctcagcctcccaaagtgctgggaaatttttattatttttaaaaattttgagacaggatctcactctgtaactcaggctggagtgcagggatgtgatcatagctcactgcactcttgaactcttgggctcaagcaatccttctgcctcaggtctcccaagtagctgggactacaggcatgtgccactacacctggctaatttttttatttttagtagagacagggtctcactgtgttgcgcaggctagtttcagactccagagtaggccaattttaatcatcttcacagcttgttttcattttcttgaaataaagaaacagaatatatttgggcaaagagatgtagcatacagagttcagaaggtcagatttcaaggttcagatttcaactattttctagatatgtgaccttggtcaagtcacttaatctcccagaatatcattttcttcacctggacgcaaggagtaacattcgtgggtggctgttttgagtactaatatcacttcccaagtgctttataaaaagaagctgatactgtaagtaattgttgcactggaattctgcatcaggaagaataaaaggtacagagcagtcccccaagaccagacataaaacaggttaaaatcagcaaagaaacaagggtttctttggttaacttacttgtccccaaaccctcagtccacctgaatgatttttgccatctgtgtcgatacatcttttaagagagttgattactttttcaaaataaatatattttgaaaagaaatcctttcatgctaccataaattggaaagcagtatcctttgctacaaataccaggtaagcataaaagtgaacagatgaaagcaaagccaatgttactaaattttagagcctgttgactgtggaagaatgtcatcctgaagctcatcttcctttgttaaaaaagaagaaggggaggcgaggcgttaggtggttttaaaattattctgatgcaaatatgagactaacctctttagcgtgcttggaggaatagacagcagaatgagtgggaagtactgatttgctattacctctatgaccttgtgccacgtaaaattgcatcccataatatgagtgttcaagtaccctattttgggagtcatgtaagatggctgaagaaatgcagattgccccattgttttcatgaggtggacaccatgctcctgggcagagtgacatccttctctgaaacctggggcttagctctgaagtcttttctttgcatctacaaagaaaacccacatttccaccacagagcctcttgttagcaggctgaatgctagtatcaaaccatgtcattaccatacatatttttgttttgtcttcttatgagaaggagaattattcctggtcacattgatggtccgttctcctgcctcagcctcccgagtagctgggattacaggcacctgccatcacactcagctaatttttgtatttttagtatagacggggtttcgccatgttggccaggctggtcacgaactcctctagcaggaacactagacaaagtctagagttatgttttcagtggtgacaccaagtagtctgtaggttctgcaaacgtacatgccacttggtgtcattagggacctctcccctgtgatttaacaaatgtttttatatcttcagcttatcatctcctgtatattaaaatctagtaaggaaattctaccccacccccatgcaaatttctgtttttataaacttcaacttggaccctttataacctttgttgttttagactaaaaaagtcttgtttgcattgttttcatataaacttgatccgtctcctttatcacatcggtgatttttcatagcccactttgtgcagttgtgagtttagggatagggaattgctttgggggattgtttgttttttcgtttttttgagacagagttttgctcttgttgcccaggctagagtgcaatggcgcaatctcagttcactgcaacctccacctcccaggttcaagcgattctcctgcctcagcctcctgagtagctgggattatgggcgccaccacacccagctaatttttgtatttttagtaattttagtagagacggggtttcgccatgttggccaggctggtctcgaactcctgacctcaggtagatccgtctgcctcagcatcccaaagtgctgggtttacaggcgtgagccactgtgcccggccgctttgggggattgttgacagtacagtccccttgaaaactcagttgatttccccttcaggtgtcagctttggtaaccgtggcgggagatctaactcaaggcctcaagttatagattccccataagtatgagttataggctacaggatgaaaagggcatttttagcaaaggtatactctttgtttccgctttactctcagactggccatttctagcctgagtctacctgtcttgtaggaccttgccaaaagccataagaagccaacccaacacaacttcctgccattttccctaactcctcactcttagcccgtatgaggtctgcatcccaagatatagcagtgagagcaagaccaaatgctgtgctattgaacagcagggatcaccagctcctcttctggaacagctgggttctgaatgctccccccctaccccctgcatttctccataaagccaatggcacaggttagtttttcttccttgcagcatcctacttctgatttatttcatattgttctgtccttcatgaagtatgctctgcagcactgcaacagtgaattccacatagagaccctccgcctttcaagacaggaagtagatttgtatatattatcagcacatcttgaacaatagtcccatgactggatctttaatttctgccacaattctgatggatactgtcaaatccaattaatttatctcgtgtttaattagatcccaataagatgtgtatgtttgtcactattgaagtaaatctggcttgtctgcttcaaaagccaatgatacagacctcaatattctcagagaaactgatgcttacaggacgctttatgctgaattaaaggttgtgaattgaattgaatgatacgcaaatttcttttttgtgtgtgataggtttggtttagcagtgcttaaagaaggagcctaatttttctccaaagtcagcctgacttttttctggtcatgtagctcaaggttaaccctcccgagtctgggacacatacacattccatttctgccgaaccagctgcctctgggtcctagggactgaatggtatctctccaaaatttgtatattgaagcgctaacccccaatgcgactgtatctggagataggttctttaggagaaccttattaaggttaaatgaggtcataagaatgggcccctatttcactaggattggtggccttatagggagaaagagtgatctctctctctacacgcactcagaggaaagctgtgtgaggacagaaacagcagccatctgcaagtcacagatagaggtctccagcctctgtcttgatcttggatgtccagcctccagaattgtgagaagataagcctctgttgtttaagccacccagtctgtggtactttgttatggaagccctaccttctttggaagcaagtgaactagtgtaagtaagacaggagggttttggagtggaaactgtgcaggctatggagttaagaagtggaattctggaggcggggcagtgtgaagtcttgttagaactggcagtggagtctcgatggccatcaaaactcattcctcgtctctcacccctccccatacaggtgtctttttctcacatctgatttcttcaaggtcactggatgtcgcatgggctcatgtctccccactatgagccctcttccttttgccccaattccgaaagtgccaaagagggactccatttgtctggactttgctcatatgcccacttccatgactcgtcagttgggtcagtgtgaggaaggatggcacaggcttgacttggatcagaggccctcacctgggccactcactgcctgggtcatgcagaacctggcagtcccctttttgaccacacattactgcagagtggaagcaggaacttaaaaagtgggggatgcccatggcagaggaaggggcaagactagacagaaggaacagtgaatgccccaatgaagacactctcctgtctgccttttaaaattcttcttctggacattctgttgtcctgaactgacctgcatttgccttctttacatattcctggtacctgaaattttaaacccttattcctctcccttctctctcatctctcccaaggcttcattaaagcttgtgtcccatcttcatctcccccagatcacatagtcacaagtcctctttccccagagaaggatggtggtacatcagctactttagtgagaagaaatgatccttctgctcttcaactttcaaagctcaaagtttccttggacaatgtctagtgttcctgtttctcctctgacagagcagcccaactcttgagtttatgtgtagaacagaggtctgaaaagactaccaaaccttgaaattcataattcgtgttacttttcccaaaatgactatctgtacaaaattttcccaacatgactatctgtacaaaattcatgtcaccttttccagcatgagtatctgtacaaaactcgtctgttcacatgacaagagtttaccttggtattttgtttgctatttatgttccacaaagagaacatattttggacatcttgtcactgttttaaaatatcaaaatagaccaggcacggtggctcacgcctataatcccagcactttgggaggcgaatgagggtggatggcctgaggtcaggagttcaagactaacctgaccaacatggcgaaaccccgtctctactaaaaatacaaaaattagctgggcatggtggcatgtgcctgtaatcccagctactcgggaggctgaggcagaagaatcgcttgaacccaggaggtggaagttgcagtgagctgagattgcaccactgcactccagcctgggtgacagagcgagacttgatatgaaaaaaaaattatatatgtattatatataatatatattgtatatatataatatatatgtatatataatatatatgtatatacataatatatatacatatataatatatataatatatatgtatgtataatatatgtatatatattatatatgcatatatattatacatacatatatattatatatataacattgtaaattgtaaataaaatttcttataaaaaggggaaatgtatatgtttttaaagcatcaagatactgactacaggataaaatctggaggaaaaaatagatgagaataaaaagaaaagaaggaacttgggaaaatgtcttcattttaatatacctatatttagtatgattctgttttttaaaaaatttaatcctgagttacaaagccataaaaatctacttagtgtttgtagtcactttatatatattttaaacactttcatattggttagttattttttcttcaggtagcatgagtcagatggtggttctaacttaattccataatctaccattgtgttgtagttattgtctgagatctaaattacagccatggcatctcgtattttattctccaaaactccacaacactttaatactttatttgaaatgattcaactgggagagtattaatcaaatatatcacttgtatagggtaaacctttataagaaaaaattacccaggaattcttcctaatcttgatctgttatttttttttcaacttagatgttgaaacatctttcagtagaatatttcctttctagtttgccctgaattcttatcttggaatcaggaatctttcagagaacatgtgttcatctctggagcttcaagccagcttgatgtctcaaaacctttttaaagtaattttcccgtgattgcattctttaagtgacagagaatcctcatttttgctcctttttgctaacagcaaggagacttttagtttccatttcttgtattatagagccttgcattcttctgtttttcctgcagatagcaaaagagaaaagaatagtggagtagagaaaatactaaatgattagattcttgactcttgacatgagaatgacattctactttctgtcctcgcatcagaggctgcagactgatggtctgagatccagatagagcccccagagctctcttgtttggtctgtatgctgttagcctgcatggtttttaaaagaaattatttgttgccacatttcacttgggagagttcacataacaatttcctccttctctagtcagttgaaacatctggcaacccatgacccagcttcctgcccacctcagccccatcagctggagctcatgaacagctaccctctcttaaacaaggcaggatccctcctaccaagttcccagctccccctgctcccgcctgacttcccaagactaaagccagccttggctgctgtttgtcctcctgattacaggattgtttttcttagagctgagaaatagttttatatttcctgtctccattacaagtaggaaatagaggatcgtgcggactagtttttaagataatggcccatttgatttattttatttttttttaacttgctggcctctataacccattgagtttacagactcaggagaggaacccactgctgagacctaattcagctactactatagcataattggaaccatctttccaattatgcctacttttggtaattccctgctgataacacagcagccagaaatatttgtatttcctcctaaagttttctgagtgacttcgttagaaggccaaatttttaagaaaacattcatgaggaatctaaatgttgccataaaaattgttttgggcttaccagtggagatttttgctatcagatttgtttttaatcttaccagcatgtcttctcacttagcatacgtcactggcttcaagccaagaaggtgaggatttccatactcaaattcccacaggataggcaggggacttaaaccaatgatagagactgtgcttaaagggcagtgatagttattttgaaatatataatatacagtatattactataatcaccctgattaaacttcagatgtctcaccacagaaaatcatgagtaagtgaggtgatggatatgttaactagcttgatttaatcattccatactgtgtgtgtgtgtacatgtgtacatatatcccaacacatcacattgtacccataaatgtatatgattatgatttatccattaaaaataacattaatttttttaaaaagacagcagtagtgattgccatttggctttagtgtttggaagacaatagagaaaatagtgacaaaccaggggatgctcgtcctatctgaaggggcagctgattctcagcttcagtaagcagttgacgcatggaaatatgggcccactgtctccttgcctagtccttggtgccttttcatgacctcccttttccagtgagggtatgtagttccctgggtgatatttgtaaccagatgttttctcagtgctcccatgggatccccagggctctacctgtctcacatctctttttctcctattttccatcaggtggcagcagacttccaagtcttcaggtttgtccagcagcttacagcctgcgggtgccaaggctgatgccctcagggaagaaatggaagaggctgccaacagagtggagatttgcagggtacctgccctctttgctcctctctactgggacaggctggggagccctcagggattccctttttgttcactggagttctcttaaaactctgtcagtgaggctctagttgaactgaatgtccccaagcccgccggctagcatctccaaggagtccaggatgaacccaaggagttggggctttgatggtgacctagacagggaggcagcattcatttatcattggtggtcctgcatgctaggcaaagaggaatgacctttatttctgtgtgaagcttttgtaaatcatctgagtcccaaagaataaattctaggtgacacaggacagttgagaatttgaccatagatgagccttgactcactgttgatacttagttatttcctttttggctgcgttttgatatttcctgagttgctttatccatcctatgcctcctggaagacacttatctatgaagttgaaatgctagccatgaaaagagtcacagaaaagaaaacttcccacttgttaagagagaggacatcgttctgaaaactgcgactctgtactcgtgtaatgatgtccttcgttgtactcattcagatgtttcccatctccttttcttgcaaatatttcacaggacttaggtagcaatagaccattcacgatgctctgtgtatatgtacatctctttacctgcatatatgtcagcttgggtttctaaggaaaccaaaactctatttagacccaaggaacaaaaacatcacatttctgtaactattctgggaacctgtcctaatcacatccagttttgaaggagaataaccagtttgcctgtggacatctctgttcttcatggctctgtctagtcttagcttgtccataggctttttctcttacagccaccctgtgcaagtggctttgaccttgcattcaggtgacattcagaatcagggagaatttctctctagaattagaaacattgaaagatttttaaagaattcattatctcccagcctacagtactatggaaccaagcaaagtaagactagtacttcatatgccagattttttgtgagtgcagctgatttgtcatttgaactcctgcatatatgccaaatatctggcgtgtgtggtattcctgaagcataactcttctctccttccaatttcatttttactgtgttttctttttttattcttttctctctctctctttttttttttgaggcagagtttcgttcttgttgcccatgctggagtgcaatggcacggtcttggctcaccgcaacttccgtctcccaggttgaagtgattctcctgcctcagcctcccaagtagctgggattataggtgcacacaaccacgcttggctaattttttttgtatttttagtagagacgggggttttaccatattggccaggctggtcatgaactcctgatctcaggtgatctacctgcctcggcctcacaaagtgctgggattacaggcgtgagccaccgtgcctggcctaccgtctattttttaactatctaccatggatctatgttcctctgttaagaattcttttttcttttaatttctttttcaatagacaagagagggtggtggtaagcaaggatgctggatgtgaatatccaaatagatcaggataaaagttcagtagctttatccattcctgtctagcttatattcgctattgtgccaaaaatgtattcatttcctcttcaaagattcgtagtacatgttcagcataatgagttaaaaaatacaaaaatatataaagaaaaacactaatattctctcccttcctgtccagcaacctttctgtttccaaacagggtagaaacctccccaccaatatttgttaagacttcattatgacaatgcactttgttaggtgccaagcagccataacagttataaggataaggaagccagtgctagatagaacctgttatatcatactccagacttttcttcataatcatacatagtcatagcatttttctagttatttatatgtttgtttgtttttgttttgttttgttctgttttgttttgagacagagtcttgttctgttacccaggctggagtacagtggcgtgatctcggctcattgcaacctctgcctcctgggttcaagcaattcttatgccttagcctcctgagtagctgggactacaggcgcatgccaccactcctggctaatttttatatttttaatagagacagggtttcgccgtgttggccaggctggtcacaaactcctgacctcaggtgatctgcccgcctcagcctcccaaagtgctaggattacaggtgtgtgctaccacgcccggcctatatgtttgtttttaataaaacagtcatattatttatattaatctaccatttaattttctcagttaacaccacatcctgaacatctctctaggttagtagctgtagttctaacttagtcttttttatttatttattttttttgagacggagtcttgctctgtcacccaggctggagtgcagtggcgggatctccgctcactgcaagctccgcctcccgggttcacaccattctcctgcctcagcctcccaagtagctgggactacaggcgcccgccaccacgcccggctaatttttttgtatttttttagtagagacggggtttcaccatgttagccaggatggtctcaatctcctgacctcatgatccacctgcctcagcctcccaaagtgctgggattacaggcatgagccaccgcacccagccgttagtcttttttataaattgcatgatattccacagtagggatacacacacacacacacacacacacacacacacacacacatatcatgatttatttagctattttcctattaatggatgttcaaactggtgtgttttagttttagtttttggcattcccaaaaatgatacaataaatatatacttatatgtatatccttataccctggtaattttttttctataggatagattccaagaagtgacatttttaggtcagagtctatgcatacatttttaaattttcatacctattgacagtttacttctctgaaaaggaaattgcattttacatttcaaccagcaatatataaaattgcacatttttcttcatctcgtaatgcatgttgctcctattttcaatttttgccaatttggtgagggaagaaaaactacctcttcactattgtgttcttaatttccctgaatataaatgttgatgagtatcatgtatttattggacattcttcatgtatttatacacattcttaatttggtgaattgcctatttgcattggcaattggcccagtatttctattgcttttctaaaatatcaatttataaaaattatctatgtatcagcagttttaaacttttttctgcctgctgtgctgcagataccttttccagtctgccatttgtcttttgactttatgttgacatctgccattaaaaatttaataatgtgtttcctttgcatgggaaaagatcctgggtagccctttggacatcttctacacaaaagttaaatgatttttcttctttaattttatgttaatgttttaaattcatgttatacacctattttatatactttaatacatctgaaatttatttttgtatatgatgtgaggtaggggtttctttctttcttttttttttttccagatagatagtcagttatgccagcatcatttgttaaataagccaccttcccctgaagtgaaatttcactatctaattactctaatttatttctggactctatgtttcattaatctgtttgcctgcacctgagacgatagtatacagtttctattctaatgatttcatagcaaatataatcttcagtaaggtagcccccactcctttttttgtagttatcttggctagtctgttacatccattttattatatgaactttgaaatgatcatatccagttcatgaaaccctacattgtgctcaagggagtctcatttgtgtgctgaactgacctccttgagagtgcttaatgctggttttgttaaagttctcttctgattattcttttatttttactttgttggttgccaactgttttaaatatctaccttggttttcctacctccccttgctgggtttcctcgaatgggttatttcccctgatctcttcatggttttatatttcctcagcaggcaagtgtttgggatctcctatattgtggcaaaccagccaagtgccagtttgtaggctgaaagttaatgaagtagtaatctgattcctcttttttgaggaccaagcagagctccccagatctttgggaaccagagagatttagcccaccaggaaaaccaagtcaagatgtgttccataagacaaaacccactgagccctcaggcaggcttgcaggtgcagcactgccttcctgtgttctttcaggagcccatccaaaccctgccttcctccctacttcaagatgagacaagcccaactcttcacaagtggtacttgctttctcttttcttcccaaggctttctataaaagacccctgaatcaatacatccaaggaagtataagtagttggtaatttttcaataagaggagagaaagtgaagaaggacctgtgagcaatgatgtaacaatagagaagacagtgaatagaaacctaatccacttggcaacagcagtatcagtttcattttgcttcgtacaggagactggctgcagtcttaggattttcactgtaaagtgacactttccatcatcacctttcctgcttttatctccccatatttcatcacataaattctttttttttttttttttgagacggtgtctggctctgtcgcccaggctggagtgtggtggcacgatctcggctcactgcaagctccgcctcccgggttcatgccattctcctgcctcagcctcccgagtagctgggattacaagcgcctgccaccatgcccggctaatttttgtatttttagtagagacagggtttcaccgtgttagccaggatggtgtcgatctcctgacctcgtgatccacccgcctcagcctcccaaagtgctgggattacaggcgtgagccaccgtgcctggtcatcacataaattcttatccttgcttcacccacgtctctgtttttctcatttagccttgtcctctctctcttttagtttgtatctcttcttttccattttattcttcttcaatgtataatctttcctttttgaaagtcaaacttgagtctgggaaagacaacaacagcaggacagatgtctagctcattttgtcctccccacaatctgaagagcacatatattgttagactaaaagacaaccttgagtctgaacctacaattccttactacaaaattagtgccatgtcatgggaagtaaatgagatgctggaagaacccatcagtactctctaatttggaaggctgtggaatggttgggaagcatttacgttacttcagatcccttctgccaaaagtatctagcccagcaaacctacgagcaagcgtggccacacccagtgggaagccaactggtggcagagcttccactggtgtggatttttctgaaacaccagtggaaggataggaataaataggaggagcacagaggacttgggggcaatgaaattattcttaggatactataatggtggatacattgacatacatttgtcaaagcccctagaatatacaacactaggagtgaacccctaagtagactatgaactatggaagacaatgatgcaccaatacaggtttatcaattgtaaacctgggctgggaccttccttggcgtgtcaggcaggagtaccacaaggaggctggacacagccagatcatttacctaacatggaggacagaagacatcatgtacaaagatgttctttggtctgttagcttcaacaaattcaaataatttttattatgatttctgaagttgcctgcaggcatcctctgtggcagcagccccacaggttctgagtcactaaatttatatcggacagaacttagatctgagaagattctatcagaataggcaggaggggcaggaaagagatgcttaccattttaaggtcaaaaaataatcctgaatagattacttttctatgttgaagataataataaaatactcaaaaagagaacactttaaaaaaatatttacttatgataacaataaatttcagacaacatgtcttggtgcctcaaatacgattaaagggcatatgggccgggtgcggtggctcacgcctgtaatcccagcactttgggaagctgaggcgggtggatcacctgaggttaggagttcaagaccagcctgaccaacatggtgaaatactctactaaaaatacaaaaattagctgggtgtggtggctcatacctataattccagctacttgggaagccaaataaggagaatcacttgaacctgggaggtggaggttgcagtgagctgagattgcaacattgcactccagctggggcaacagagtgagactccatctcaaaaaaaaaaaaaaaaaatcaagggaatatggattttaggcaccaatagataaaggtgagataaaattgtcaagtaaagtggaaagggaactgaatgagattaggaaatattttttaagtaggaaaataatgcaggtatggaatcgattttagtaaacaacagaattgacactgcagaaaggtgagccaatgatgtagagaaaaatttgagaatttcttctagaatgttaaggtgagagccaaaaagaatgaaagaaaagatggcagatgttgaagataatggaaaaccaatgtacagataataggggatcctgaaaaataagccaaacaaatcagaagagcatagaaaaataaaattgacttgcgtcaaagatctcaatctcaaatctgtgattctgaaaaacagagattttgcacttttctttacctttgaaatgattttttaaacaaacgttcttaaatcagtaaactttattttttagagcacttctaattttgcagcaaaattaagtggaatacaaagaggcctcccatatatgtcattcccccacaaacatacaacctcccccaatgtcaacatcacacacacagtggtagagtctgttacaattgatgaacctgtattggtgcatcattgtcttccatagttcatagtctacttaggggttcactcctagcgttgtatattctgggggctttgacaaatgtatgtgaatgtatccaccattatagtatcctagagaataatttcattgcccccaagtcctctgtgctcctcctatttattcctccctgctgacccttgacaaccactgatctttttattgtttacatgcttttgtcttttccagaaagtcatatagctggaatcctacagtatgtagcctttccagactggcttctttcacatagtaatatgcatttcagtttccttcaagtcttttcatggcttaacaactcatttctttttagccctgaataatatttcattgtctggatataccacagtctatccactcgcctactgaaggacatttttgtggctgccaagtttgggcaattatgaacaaagatgctgtaaacatccacatgcgagcttttatgtgacatacgttttccattcatttgggcaaatgccaaagagcataattgcctgatcatatggtgagagtatgtttagttttgtaagaaactgtcatactgtcttccaaagtgactatactctgtattcccaccagcaatatatgagaggtcctgttgctccacatctgtgcctgcatttagtgttgtcagtgttttggattttggccatttcaattaaggttctgatccttgttcagtctgttttttgccttttactgtgtttgtaattttttgctgaaaggcggacatgatgtattataaaagaaacagcggtaaatagttctttggtgatgtggtaaggtgtgggagaaggggaagcattcatagtgctatgatcggtctctttcttttggtgagcctgtgccttagggctgtgaatttcaccagtgcctctcattttgttgttgttttaattattattattcctttcttaggtgggacagaattgctagagggggttggcgttgagtatttcccttcctcttggtaggttaggcaattttaaaagcccaatagtttaggcttgggtaaaataatttctctttaggggagaccttgttaagaatggagtactctagtatatttcaaaatggctacttttttcctcctggtgctgaaagcaggagaggatttttctctgaaatttcctgtgagaacctgatcttagagctcctagaggtaaaagtgggtccccctggaggatttaactttcacacttgtccatgctgggcctccatcaactcgtcaattacagtactggttttcctgccccagtactgatttccgcagaggtttctgctagtatctttttacttcagtgagttataattcttgtgtttgcctgcctgtgtctccaattttcagggcagcagtttgctctgtgaactcacttcactgccaaatctaagagttgttgagtttcagtttgttcagctttttacctgttagtactgacttcaaagccccctgcgtgctggaccagaaactggaagtcaacaataaaaatcaaggtgtgattttcaccaagaaaaattatttaaaagaccagtatttataaatatcttggaggcttttttaaacaacagaatatttaaaatcctaccattggccaggcgtggtggctcacacctgtaatcccagcactttgggaggccgaggtgggcggattgcctgaggtcaggagtttgagactagcctgaccaatatggtgaaaccttgtctcttctaaaaatacagaaattaggtgggtgtggtggcatgtccctgtagtcccagctcaggaggctgaggcaggagaatcgcttgaacctggaaggcggaggttgcagtgagccaagattgtgccactgcactccagcctgggtgacagaaaaaaaaaaaattctgccataaaatcatgagctattctaccacaaactcatgaattgtaaaatattgctaacaagatttgacaagaagacaatctttgacaatataatgacaagaagacattataaaattgagagttgtttctagatgagaagagttaatattataaacattttgaatttcccagaattaatttgattaatactgtagtaagtagatataattgtagtaaatttttcaaagaatgaaaaaagatttcaaaagttaatatggaagaattactagagctttgaattactagttcttaaaatacattatacagtcacatgattaaaacttaggaactatttcagaaatatatagatcagtaaaaaaaagacattccagcatgaagaaaatccaaatacaatgtgatttcatctgataaataagacattttcataccatagagcagtctgctcaattcatgaacagttctgggacatttggttagctatatattaaaaaaaaaaaaaaaaaaaaacagctgcctggtgggattacaggttaatttggttacttttatatttttctgagtgtggattagttgtaaaatcagaaaacaggatttttcaaaatgcattaaattctgttgattaattatgaaagggttttttacctttataaagaaaatttgctaatgatttagataaatgagaatttgatttatagtttccttacttgaagtgtgatttttttggaatccatattgttagcttaacaacacagtaatccaatcatgcctttaaaaatcctttcttcttcctgagggcacatatagatttttgtagggtcatctgttagagaagcacagatgccgagatgttgaaggtgtatttgatgcaacgtttagtccttcagggccttctttcctttcctctgtctactgagccatttgtatcacttaactctttgtttttctctgacttgaaatgtcctcctccagctgcctggctggtgatggatatctcctgagcaaagctgctgcggggaagacagacagggttgattcccaccttggcagcctacaaaagcattcatttaagggacctcaggtgaaatggagctgaggtgatgtttgagcccattttattattctttgggaaatttaccatccttgagccttgattttttttttcatctgttcattcagcaaacagttgtggcgcccctactgtgctaaacactttgagacagtgggtaacagacagataagatccttgaactcttgctacctatggatctgaaattggaaattcaatactaaacctaagagagttagaggagaattccttgtaacattgtgcctggcatctagacccagtgaatgttaacttctttattttttattttttttttattttgagacagagtctctctctgttgcccaggctggagtggagtgttgtgatctcagctcaccgcaagctccgcttcctgggttcacgccattctcctgcttcagcctccagagtagctgggactacaggcgcccaccaccatgcctggctaattttttgtattttttagtagagacggggtttcaccgtgttagccaggatggtctcgatctcctgacctcgtgatccacctgcctcggcctcccaaagtgctgggattacaggcgtgagccaccacgcccggccaatgaatcttaacttcttttactctttctttattctgtgaaactggaccaagcataacattgtctaatctgtacttcaagctctctggagaacacacttcctcttttcactctgtgagtctgttctgttgccttgtgtacaagaactcttgaatgatgttctcagcaattgcttgcctgtcacagatactgaaaatgaaacatattgctcctgcaaatcccagtgttcttaatgagaataggcttaattagcagctagagagactgagggttatggggttggtgcagattgcttgaggtttcatggaagagcctcttcctgaagcatatagttacctgctttcattagttcagcatctaggtcagctttcttgtgctgttgccatgtttgccccaacctgaacacgtaggctcttctctcctcaactgagtgcctcttctaaggatctgcagcctagagcagctgcacaagggaggaaccttagagatcgtatgacttgagcaagcaagttcggataagtgacatgctcaaaaatatggttaatgacagagtctacattctgctcaaaatgtacttctattatgccaggctatgagtgattccatagaactgaaagctgttctccttggaggacaaaacattccagatttcaatgcagcattgggtcacccaatctcatggacaactgaatatagtgaaggattgataacaccattagatctgtgtgcagttttgcatgagtccagattttgccaagttttgagtcagcaatcctttccctgtgcacctgtcttatccaagcttcctccaaattggtgcatttccatctctttcccatatgcttgtgatcaaccaatcagtgttgagtcagtattgagaatgaagggaagcagaccagtggaatgatcaaagagaagaaatggcattatcaaaagagcaatagcacaatgtgtgcttggagcttgcttcagaataggggcacaagctgtagagatggatggaactaatttgcacatcactcctctacaccaactttgactttaactgtggtccaaatgtcaaaatctctggggaaatgactgacataggtgttcttttcaaacttacgcatttttcagagttgtggttgacaaatatgcaaatgcccatggaaagtttgtatcatatcaagtattaaaaaggagattaagcagtgtttaaggctctttctcacgtgatgtgttgacttatgcattagccactctccattggtttatgttttaccttggttgtatattttaccttgcacaggaccagctctcagctgatatgtacagttttgtggccaaagaaattgactatgcaaactactttcaaacggtaagtgcccagaaaggtgagattgcttaaaggctgttcgtaggagaagggaatgtgggcatggaattaagagtcccttaattgatcacatcatagaaaaaggtgggagctttgaccattttactagtgaaataaatcctgccatgctcctgatatggatttctccaaaaaccttagaataaaactcaatcccatccctcgggattattgcaactcagtccactgattctcagccaggaataattttgttccttctcttggtgggcagttggcaatatctggagacatttttgattgtcacagttgtggagggaggtgctactggcatttagagggcagaggccagagatgcttgtaaatatcctgcagtgcacaagacagcccccacaccaatgaattatccagtccaaaatgtcagtagggctgacattaagaaactgtggtctgtgctaacaaggggcttgagaaaaataggaaggcaattccttccccctgcacattttcttttttaatctagattttatgaaaggcagtgactgataggtatatgatgattgatgtggcctgttggcctgcctctcaccaatcaaagtgatttagacagtaagaaacaggatcagagtcatctaaacttgaataaactggtacaaataattaagactcaggttgtttaccagggtaaatgcaaagcaagtcaaaaaacttcgaaagagaaaaaagttcaaataaaaaaaaatcagttatgctcacctgcctttaaagttgggaataaaaggctaagacctaaaagctcttgatttataatcggggaaggaaaggaatgataaagaaggaaggtaaggagaggaaaatcaagaaattctgcaaagtttaaaatgctttgataagtatggtcaaacaactgtgggctgttagaaattttccaacatttcattagtggttcagaatgcagagaagccccttctactggaaaaggagttgatatgcattacttccaacttggaaagtttaattaattaatttatttatttttattttttgagatggagtctcgctctgttgcccaggctggagtgcagtggcgtgatctcagctcaccacaacctccacctcctgggttaagatgattctcctgcctcagcctcctgactagctgggactacaggcgcatgccgccatgcccagctaatttttgtatttttagtagagttgtggtttcactatgttggccaggctggtctggaactcctgacctcgtgagctacctcacctcagcctcccaaagtgctgggattataggcgtgagccaccgtccctggtggaaagtttattttaaagtggtagaattttttcaggtgtattccattggttgtattcatgaaggtaatatttaattttagaaactcaaagacgttagagttttactgatgacctcattgacattccaagctttactagacagcctaattgtcattcggataccatttatttcaatattctgatttttaaaaaagttcgtattagttttactttaattttacttagggatattagtgtccaccctccacaacaagccttcaagcagattaatttcctctgttttccttatacatgcccagttttggggaagggataggaggagtcagtaaacaaatgaagtaactagtgtttatgagtttcatctgctcttatcaacatgttggccacttttaattaatgggatggtcaaaatagaatactttgaaggaatttgttctttggactgcatcattttcaccaaagcaatcccacctccagggtatttgaagaagattgcagatcaagccacaagttttctgatcagttatatgttagactaactttgcagaaacaaaagatgtatacaagttaatgacatttaagtcgtacatatctcataagtaaattatttttcatatttatttcaacaaatttgtttctattttaagagatggggtcttgctatgttgcccaagctggtcttgaattcctgggctcaagtgatcctccagcctcagtctcctgagtagctgggattacaggcatgagccatcacacctgactcagtaaatgtatttctaaatgtgttttccatttccacttgctacagttacccctttctttgttgccttttgcactgaggatgggttgccagaggaagaagggtggtgataaaatcaagctctctaagccacgttccagctctgaagagctccccctattcctgtctggttctcctgcttcccaagtttccacttgtagtgactttgttgttatggaggctaaagaggaagcatgctcgttattttaggtagattggaggagggaatgggtgactacctccttccgcatgtggaagcacctttctgcaaaatgctttgcatgccatggcagcctgtgtccttgcccctcactaagggtgatgcttgccttgtgtcttctcagctaatagaagtgcaagctgaataccacaggaagtccctgacactattgcaggctgtattgcctcagatcaaagcacaacagggtaagtgcaggccttccctggagaagggagggccggggtgcctgcttgccttcccggatgagatgaattccttgtatgtcgttggccctaacactctgcccaacagcatcacctgtagatgagccttttggacttacttccaaactggtgccttgagtcgggggtgcgtaggggtgcccatagaacattaaccccagtggccctggacgcaattggctggccatcccccaccccctcctccagtcctcctgtcatccttaaaaccacagaatggaggctcaattgggcctccctctctttggtaatcttaggagaatctggacaacaaaggaaagcgagattccagcatgagtgaacttggcgaacagctgactgactctttctcactcctcccctcagaggcctgggtagagaagccttccttcgggaagccgctggaggagcacctcaccatcagcggccgggagatcgccttccccatcgaggcgtgtgtgaccatgctgcttgagtgtgggatgcaggaggaggtaggtctgagcacagccacacgccgccccgggcaggtctcctcttccacgagacagagcttacaggatcctctctcctgtaccatctccactccggcccccacgaatccaaatggcttaagacagtggctcagacccatcttctgcagaacacaaattgatcctgccttttaccgtgagccttcatttgacaagaagagagaattgtgatggccatgaggaacggatggccatattctagtcattctttcccctggtttaacatgtttggataatttgggcattctgctattttttttttttcttttgagacagagtcttgctgtggcacaaggctggagtgcagtggcgcgatcttggttcactgcaacctctgcctcctgggttcaagtgattctcctgcctcagcctcccaagtagctgggactacaggcgtgtgccaccacgcccagctaattttttttttttttttttagtagcaatggggtttcaccatgttggccaggatggtctcgatcccttgaccttgtgatccacctgccatggcctcccaaagtgctgggattacaggcgtgagccactgcgcccgaccctgctgctattactactccttctcctttctcctcctcttcatcttccttctcttcttctgcctcttcctcttgcttaataagttacctaattttaggtaattttaaaggttaaggctcttaaacttttttatcacaactcttatagagatcctgaaaatatgattgatagatatattagaaagtactttttaagagccacatgtaaaaaatgtctatgagaaatttttttttttctttttgagatggagtctcactctgtcacccaggctggagtgcagttgcaggatcttggctcactgcaacctccgcctcctgggttcaagcgattctcctgcctcagcctcagagtagctgagtttacaggcatgtgccaccatgcctggctaatttttgtatttttagtagagacgaggtttcaatatgttggccaggctagtcttgaactcctgacctcaagtgatctgcccacctccgcctcccaaagtgctgggattacaggcatgagccactgcacctgacccaagaagttcttgataagtgttgttttattgctgtgtaaatcatttcctgggagatagagctcatctttggtttcttccatagactattttaatatctttactccgtcttcctttgatctgattagccaatcagtatttatttagggcatgcggtacgtgttttattgagcaaagtatgaaatagtgagataggagacttataaacttattgccggagatgaatctagcatctctcagttaagcctaattcatccagaacagtctgtaagtctctaagggagcactaagttatatgggacaaagtaagggctatggatgagaaggaagccagtgagcatgcgggtgtatgtggcatgcttcctgtaggccagcctgttctagatgctggaaattcgaaaaggaatgggaataaatgtgtatttttaacacattttatatgccaggcatttgcatgtttgttatcaaattttttagcttagcttagcttagcttatgagacagggtcttgctctgttgcccaggctggagtgcagtggtgcgatcttggctcactgcaacctctgccttccaggttcaagcgattctcctacttcagcctcccaagtaactgggattacaggctcccagagcctgtaatggaatttcagcatgctggccaggctggtcttgaactcctgacctcaggtaatccgtccacctcggcctcccaaagtgctgagattataggcgtgagccaccgcactgggcctcaatttaaaaccgaaaaggtctctaccatccctgagagagagtttcatggaagaagatgaactggaccttttctttccctgaaatttttaaaaaaattatggaaaaccataaacacataaagataacataatgagccttaccactcagtttatgggcattcttgttacgtttctgcctccatttcctgcccccaaacccctgccttggatattttgaagtacaacctagacattatatcatttcatttataatacttaagtatgtatctctgtaagatagcggatgttttgaaatataatttttggctgagcacagtagttcacacctgtaatcccagcagtttgggaggctgaggtgggaggatcgcttgagcccaggagttcaagaccagcctgggcaacatagtgagatgctctctaaaaaaaaaaaaaaagaaattagttaaaaaatataataggctgggcttggtggctcacacctctaatcccaacactttgggaggctgaggagggcagatcacctgaggttaggaattcgagaccagcctggccaacatggtgaaaccccgtctctactaaaaatacaaaaattagctgggcatagtggcacacgcatctgtaatcccagctactcaggaggctgaggcaggagaatggcttgaactggggaagcggaggttgcaatgagccgagatcacgccactgcactccagcctgggcaacagagtgagactctatctaaaaaaaaaaagtattaatattccccaaaaagtaacagtaacctattaaaatcatcaaatatctaatcaacataaactggtttttgaagagcagtacctttgacatctcccagctcccgtctctgccctttctgggctactccattcctcaacagacctcgctctgtcacttgcattttttccctgttttgtgtcagctctttacttttagtaacaaataggttcaagtttcccctagcctaaaacaatatatctcttttcaacacaaccacagcctcatatgtcttcccaatctctttggttttgttttttatgctatccaatttcttaaaatagctctcaacatttgcagctcctgcatctttgccaccacctacagatcttcctctggtgttgcttcgcccctgtcactgggctaaaactgtcctccgggatccccagcaacccccaaattgccaaatccgatgacttactgccagcctccttggccacagtgctgcctggtgttcctaatgtaaccatcctcgaaacttctagttcctttggccctctggttccctctggcctctgaccacaggggcatcagggttctctgtttagcaccatggtcccctctggcctctgacctaggggcatcagggtcctctgtttggcaccatggtccccaccctgccctgctagaggtgctcctcaacctcagtgaggactccccctgtgaaaaggcttcactcgtgctcactgccatccttcaacatttccatgcacactttcctctaacacccccgaaacaggactcattagctaatataacaatcccctcctccacctagtttttatgctttgctcagttacacaatcaaaaatctaaaggcttatctgtgacagctctgtttccttctctttggcattttccatcaccaaatcctattggctcttcttgcatggcaagggcatggttttatgaagatctgagtgactcctttcctgtattctgcagttggctgtctttgtcgtagcagccttactgatacactcatccaaacatgttcatgtagcttcctcacatatatgcccaaagagctttgcacatgtgtgtatctgatgtaccctatattgagaagggagttagtgatcctagcaaggcataagcttgatattccagagtaggaacactttttctaaaggaaattggaagtctatatggccataaaagattaaaggagtaaggactgttctgcctgcttgtttatcagcctgtgggttgcattacagaatgcaaggaactaagatgaaacagaaaccgataggtctttaacccgtgtgtcacttacctgtgacgtggaggtttctttccaactctgacctgcattcatcttctcttccacacagccctctcctcttctctttcgcttcatagctccctttcactctctaaggtgcagtggttcacttggaagaagtggcagtgatttgaaaataactcttgagaacggaatgcagaggaatggaaggaggctacctcacaaaccaccccacccagtctgcccttcccctgaaggcatagactttatttgattctaaaagtgtaggccgggtgctgtggctcacgcctgtaatcccagcactttgggaggctgaggcaggtggatcacttgaggtcaggagttcaagaccagcctggccaacatggcgaaaccccatctcttctaaaaatacaaaaaattagctggacatggtggcgggtgcctgtaatcccagctacttgggagactgaacacgagaattgcttgaacccgggaggcagaggttgcactgagtcaagatcgggccgctgcactccagcccaggcaaccgagccagactctgtctaaaaaacaaataaacaaaaataaaaagtatagccctggttcctcccaacacacatacacacacacacacacacacacacacaccccctgtagacctcctcacattcaacttaccagactgaccaggtcttagtcgaattcttctccaagatttatcttacacgtacaagaacaagatgtctaagtgcccaagattcatttatccagtaaatagttactgagccagtgtgatgagccacccctgcctgaggctgtggggacacaacagtgggtaaagccagttcctgctctgaagttgcttatgtgccaagagggagacattgagaaagcaggcaactgggggattgggagatggtgttgggcaaatgcatgtaagaggttttggagaaaagaagcaggcagttgcggggtctctgcgctttgatgttgtaccttggagttgctgtgcgctgaccctctgtcctgttggtagggactcttccgagtagccccctctgcctccaaactgaagaagctgaaagcggccctggactgctgcgtggtggatgtgcaggagtactcggcagacccccacgcaattgcaggtgggcacctctcagcgctcctgtgtgccatggaggctcacagggaaggggtagaggggaggctgtgtggctacaagtccaggacactcaagtcagtggctgcccaaagcacttcagatgtgtccactcagtgcccagtttcagggctgggtgctctggccccttgaaggaaggcctccccgcatgccaagggaagacgaggtaattgtgggaagaaagaggggccaggtcccctgtcagagcctcatacccatttccataggaagctaccatttgctgttgacatggtggtcaggaggcccatccccagatggaacccacataggcagtgctggctggtgggtcttgcctctgccacatcataacagttcacaaccaatatttcattcatgcctaggagctttgaaatcttacctccgagagttgccagaacctcttatgacctttgaactctatgatgagtggatccaggcttccaagtgagtaccccttgttttggaatgtcctgtgagttacagtttatttgggagtatgtgctgaaattatagaagcatgtaacctatgatctcgcaaccccgtttcttgatctctgccatgaaggagtgcttatacatttgcccaaggaggcaggtccagggatattgatggtagcattatctgagatagcagaagcctagaagtcactaaagattcattggagaagggggttgggaagtggctaagtaaactgtggagtgtctgtaccatcgcacactctggaacaattaaaaaataggtagagttattcatgctaacataaatagataatgaaaggaagttaacaaggactcctgtgacattctattgttataaaaacgaaaacaaacacccagcacacttaaaacaatagaattttaaaaggacctatatttgtgtgtaagtgtataaaagaaagttctggaagggctcacgtaggctgacagcagtgattcctcctggccagaaaagtaggacaagtgagtgggcatagagtctttaccctcatctataatagctgaatatattttaacaataagtaataatgaacttaaagggaggtcacgtgtcatgacacgtgggcagcagcagcctctctctcccctcctgaagatgcgcccaagggagaggccgcagcccaaagccaggcgcagggctgtagcagtgtgtcgggaagagtacagctgcatggagcaggcaaagccactagcccagccctgatgcatgctctggctcccacgcatggtttttgagtcctggcttatttcctcggttatgcgtgcattaggatggcattgtatgttcttttgggcataggtaagagctgtcttaagtaaatagtattgtttggaggaatgtacttttactgagcgaatggacccccacacaacagcagggtgggagaattgctaccagcacaaagatgatggagacgagggtagagatagtctaggtgggagatgaaggagggagaagaatgttttctgagagcaggactagagcaaatagccaccttagccaggggcctgtgaaaggaaatgatttctagagatttctagtcataggatttagttgttggtgtgtttctcaacaacaccatgaggaacaggtgttgtttctcattacctgtcaggaacaacagtgaaatatgtgtctgatgctgctccttctactttttgaagaactgggcctgaaagagacccacctgacctggaagggaagccaggctcaaatgtgtagagtgagaaaagccaactccaatcaagttgcataatggtattttatttccaaagcagaatggagattatgcacttcaaaaggctggctgaatatatggttctcttttatctcattgtgaaaagggagtgctgggtttcatgacattaataattacaacgttaccatttattgagtgcttattagagacttgacattgttttaagctcattgtgtgtttttaactcctgtaattttgacaagaaccctatgaagtggggtgtgctgtttctcctattttacatttgaggaatttgaggtattgaacaggtatgtaactacaggttacctgctggctaataagtggcagaaggggaacttgaatccaaggagtccggtttcagggcctttacacttaaccacagcactttttgcctctctaggacaagaatgtggtcctagggatgaagccaagtgagaacatatcctttgatggaaactgtcactcttattatttattggatatataagtgatcttgatgatatacagttagataaaggcaggatagcttagtgcttcaggacctatccagagatactcctgttcccacttcatttgcaaatgtgggtctccattaagaaatagaaatgatccagatgactcaaagaggtcagtgtctttgaaccagggaaaaacaagaacctgtttctaccactggatgacatgcatgtagtacctaagatcacttcatctaaaccaagtaattttgcctagaacagtgatttccaaccctctgtgtgcatcattatgtcctgggaagctttttaaagatactaatgcgtgaacccttttttcagagacttcgattgaattgggctgggttctgtgattcaaagctcccaaggctattgggttgataacctatgaacctctgatgaagctgagtttcatcagaggccaacactaaccttaataagacattgcacttcaggccaactcagcaggacacagacagatctgccataagatgggacatccgggggccacaggaggagccagggaagcaagggctgaagttagggattaccaggacagtgcaagatagccggaaactcaaaaaggacacatccttgcaagccatttacatgatctgtttccacgctggagtcatgcagaatacaggctcagaatagcccatgggctgagctccctgactggcatctgtgtcctcctgcagccccatagccctgccacaccagagcaggtctctggctctggcacatattcacttggggcctctgaggtgtgtggaggaagcactgttaaaatcgcacaggacaagacagaaggagaacatagaggggtaaataataacaaccaaatttttaaatactagcttgctgatatggtcagttacagtggttggtatcaaatattacaatgattggttaatatgatttccgatgagactttattgattcgtgctcaaccaatgacctttcctatcaatttctcagtgtccaggagcaagacaagaagcttcaggctctatggaatgcttgtgaaaagttgcccaaggccaatcacaacaacatccggtaagtggatacttaccaagtatagacacatggcttgggcttatgtaagcctcagagatacaactgcccgggtaaaagtcatggtaactaccatgcatagcattttatgatgtccaaggtattattaacatgcatggtctctttttttttttttttttttttttttttttgagacagagtctcactgtgtcgcccaggctggagtacagtgggatgatctcagctcactgcaagctccgcctcccaggttcacaccattctcctgcctcagcctcccgagtagctataggcacccaccaccacgcgtggtctctgtgtgtggtggcaccaccacaggtcccaagccaccctgtgagggaaggcaggaataattgttgccattttttagataaggaaatggactcaaagaagcgaaccattggctaattcagttaaaggagcaaagatgaatgcaagctatcttaagatattggggatttgtggtaaagacaggtaggtgttggtggacacctgggagaagctgacctacatgggagctgggggaggcagaagtgtccttgagcaagttcacaggaaggagagatgagggagcgtgttctccagtgctcccccattcccgagccctagctgtgttccacgtctgcctctcgcttttcttgctaccacccgagcttccacttccggcgcgctgcagatccttctccacgcctggctcctgctgcttcacactctgcttctttaccgctttgtcttgccagcacccatcccggccctgccgcctttcctcccagcttcttaggaggcagattttcagcatcagcacctactgccatctgcctggttatttctgttttcctgttaaaaatccccagaatgatgggatggcagttcctcaaacaattaaacacagaattactgtaggatccagcaattccacttctgggtatgtacctaaaagaatcgaaagcagggacttaatattttcacactcgtattcgtagcagcagtgttcatggtaggtaaaaggtgaaaagccaaatgtccgtctacagataagtggataaacaaaatgtggtatgttcatgtaacggatgccattctgattcttgtcatcacgtggatgaaccttgaggacgttatgctatgtgaaagaagccaaacacaaaaggacaaatgcagtatatgattccacttatatgaagtacctggagtggtcaaactcatagagaaacaaaatgggatggtggttgccagggctaggggatggttgccaggggctaggagacaggagattattgttttttgttttgttttgtttttcttgagacagagtctcactctatctcccaggctggagtccagtggtgcaatctcggctcactgcaacccccaccacctgggattcgagtgattctcctgcctcagcctcctgagtagctgggactatgtgcatgcgccaccatgcctggctaatttttgtgtttttttttttttttagtagagacggggtttcaccatgttagccaggctggtctcaaactcctggccacaggtgatccgcccgcctcggcctcccaaagccctgagattacaggcatgagccacggcgcctggctgagattattgtttaatcgggacaaggtttagctagggaagatgaaaacattcaggaaacggatggtggtgacaggttcataacactgtgaatgtacttaatgccaccaaattgtacgtctaaaaatggctaaagtagtaaattgtacgtatattacaaatcagatccgaagagcgggaatcgggtggtttcaacttatggcatgttgctgaccacagccctaggccgctggccagcccatgggttggcctaagctctcagcttaggtcccacatcctggtccagacctgtgtggcctcttggagggtggggcatggccaggagaggccgtgcgtggagttgtcacagtgacagctaagtgattacatggtaggacatgagtctgctggactttctaccgggctcacgaaggtgagcagaaaatcccgaatgagtcgcttcactatgatccaagcaaaatggggttaggaccacagcctattgtaactgagaggccagagaaaacatgtcttctcggggtcctggggcctcttgtcaggttctggcagatttttagtgtggtttgccagagctgttttttttgaatttgcacgtagcttcttcattgtatttgttttatttctatatagcttctttgttggctctttttataaaataactttattaagctatgattttcataccattgaacctttttaacatgtgcagtgtagtaggttttagtgtgttcatatagttttgcaactattactggtgtctcattttagaacatttcccttaccccaaaaaagaaatccccttccgataagcactccttattttccccaaccatgcccctaagcaaccactaatgtactttctggctccatagatctgcctattctaggcatttcatataagtggaatactataatatgtggcctgttgtgtctggcttctttcacgtagcataatgttttcaggagtatccatgttgcaggatgtcccaacacttcattcctttttatggatgaataatatttcattatatggacataccacatttaatttattggttcatccctttatggacatttgggtcatttccacccttcggctattattaataattatgattccatgaacattcatgtacaaatttgtgtgtggacagctttcttttgggtattatccctaggagtagaattgctggatcatatactaagtctgtgttggactttttctttattagatctttccagagcacccaactgagggtaactccaagaaacaccacccctagcatgtagatgttcctgccaatggtacttagacatactgcttatcactcctgcacacagggaacatggcaagaagtaatggggtttgtaaaaagtgaggcacttcaggtcattatatactgagtcagaaggaaagaaggagactttctggccagtgttagttgaagcagatgtcgacacctgacccagtgagatctgagcctgcctgtttttggaaagaggatgcagaatttccatttcctgacacgtgacgcatgttcattacattgcaggtgcacgagtctcctagtcagtgagatatgtgacatgagagaagcttctgtccagtccccgggggacatggctggtgttgagccttggttaaacctggcccttctaattttcttttagatacttgataaaatttttatccaagctgtcagaatatcaagatgtaaacaagatgactcccagtaatatggcaattgttttaggacccaacctcctatggccacaagcagaagggtaagtacagggcggagaagtaatgtgggtgatcaggtgggactgcagggcctgagcagggtgggcaggacagctggggcctagctgagcaccagcctcatgtattttccaaaccctatttctttgttggcctgctcctcttttaggctgaggaggaggcacagaattctgcagatctttctttttgttgatggtcccagagctacaggtctgaagtcagggtcttctctgagctaattaagtcagcattgggatgaggggaaaggagggcgtaggacatggtggcacaggtcaggcaagctcttagactctgtcataagaggacacatcccagcctcaggattcggagggatagaaggctgtctccagagatagcagtgttggaaagaggatgagaatcacagggacgggagggaggagaatcacacctcacgttgaaagtggctttgtagggattgttcatgtgcctcgggtttatctccattctgcagatggaaaaagagaagttcagaaaggtgaagattccctcccaagagaaagtctgctctcaaacctctgtctgtggggttccagtccagggccccttcctgggctctgcagccagaggaccatgggcctcaaagcttgcctcagctgctaactccaccctgtttgcctctgctctctgcttacaggaacattacagagatgatgaccacagtgtcgctgcaaattgttgggatcattgaacctatcatccagcatgcagactggttcttccctgggggtaggtgacagcacctaggtgtgggggcaagaggcagggaacaggagtatcactgcgagttctgagcctttgaagccaagtaccactgcccacaggcttttttttttgattcccctataaacacacacacacacacacacacgcatgcagacatgcacaaaggcacacacgtatcagggtggagtcatggcagcttcctgttctgtaatctctatattttttgagatggagttttgctcttgttgcccaggctggattgcaatggtccgatccggctcatcgcatcctctgcctcctaggttcaagcaattctcctgcctcaccccctctacccactgagtagctgggattacaggcatgcaccaccacgcccgactaattttgtatttttagtagagacggggtttctccatgtcgctcaggctggtcttgaactcctgacctcaggtgatctgcctgcctcatcctcccaaagtgctgggattacaggcgtcagccactgtgcccggcctgtaatctctatttcaagggacactctggcctgaaggtgtccactgtctgtactaaccatgtccgtggattttactggtctaatatccataccatagtttcttcaaatctgcaaatcttagaatgcttgtgcaggaaggaaagatcctctgccccaaatccttcactttgtagatgcagagggggagacaggttcctgagatggatggggacttttattcaggacttgcagatcacctggatgccttacagacccaccttttgctaccctaggttgtgccctttgagttgtccctcagcatgtgaaggtggggctcaatctcaaaggcaatgagattcttttttttaatgcctgcttcaaaattaggctctgaagataacttcctaagagggagtttcagagatgttctgagccacagaagcctcactccataagtagatgactctcaatggtgacagctttgaagagatagcagttgttacactaaattcggcatctgcttaaaaacataataattggtactgtaccgtatgtttggtagacattaagggaatgctttttgctgtgctgcaacagctgttaaggcatgtgaggataggttagtaattctatgctctgcccattagaggtaatcaattaaatcaattaatgctgttctaacattgaagaagtttgattgtctttcttttgcttcatgtgttttaaggtcgaactgctgactccctaagagttgcgttgataacagagttgggtgggtgtgggaaatcaagataaagaaataaaggaggtaggagtcaagacagtaatcctataggttctgcggctgagctaattcattaccactgcacacagacagaattgtgcagagctaatttattctcattgactgggaaaggatgggatgagtacttctgtatatctctttgacagccaaaaaacaactttaatgaaatctatatttctaatatcttgaatttattctctatggttttccagaaaggcagtgtcatcatctataaatattaatattgcctcttattttattttcttgactaattccattggctagtgtttctcaaatggtgttaagtaatggtagtggtagtgagcattgccatttctcctgattagtttaggacagctgtcggctttcagtcttaagcatgaggttttagaaagatgatttcatatatttcagaaagtatccgttcctgtttttacaaactttttttttttttcacaaattgacattgctttattaaatgcctatataggtgatcacatgtgtccccctttttggcctgttaatgtgatgcattatattaataaggtgaaccatgggatgaaattttctagggatgacatacgagggagtgggtgtctggactcattcctcccctgcccaggaagggtgtggcagaccaagagttcacatgtaccaattctttcttccccgcagagatagagttcaacattactggcaattatgggagtccagtacacgtgaaccataatgccaactacagctcaatgccctccccagacatggaccctgctgaccggcgccagcccgagcaggcccgccggcccctcagcgtcgccacggataatatgatgctggagttttacaaaaaggatgggtatgaactggtgtctctttctcagcactggggattaggggaggtggtgggggtggatgggtgacgcataagaaaaatacaattacgggaaggctgcactgactctcagcagtttaggtgactcgtagcaattaaactgtatctgctgtgtctgggatgagtttctttggcttgccgccctttagaccagaggtcagtgtagccttcttagctgacacagttgtgatcagtattaattagttctcatcaaaagaaagaaaaagtagtcactgagtgcaattaaaaaaaatacatacgcactttatttggaatcaaaatgtatacaagtagatcaattccagaatttgtagtggctttactttgattatgaatgggctcattgcattcttcagaagcatcctggcacaaacaatacctttaatgtacagtttaacgttcccagtttcagcctaaaacttgaaacagcctgagcgtaaaatccttctaggtttttaagatgttttcctatcttttattattaacatccataactacttcaatgcagttattaagaggcttgtaagtacattcaatttagtttgctcagcaacaaccctgtccacactcatgttaaattagtttatataatattgaactacataatgattcccatagcaagtaagatgggcataaacaggtttcgtaacaagcacagctgactcacggtgagcaccggctcagccatggcaaccagaggacgtggactaatgagcgtgttcagcaagctgcaggcatccacgaatacctcttacaggaggggatcgtcttggttggtcaggcaagtcagttcagtgaactttggttagaaattaaaaattactactgtaaaataaaatgtagcaagtgctcctttaggatagatgagagcataaagcattgaatgggagtatcggaaatgcagacaacaggaagtaacctagctagaaccttcccctttccggacagaccactgggcagccagaaagatatgcttgaaaaggcccatggcctaaagcggtgcaggagggaaggttgaaaatccaagaactgttagaggtgtgtgaatcttacttttcaccccacttctttctgaatgggagttggtattggagaactaaagttggcagaggagacctaggcttgtttcctgggatgacggtcaagctttcacaatggccagtatctcttctttgttacttcacctatcagagacaatttgtatgtggcagatgggagttgtttgtgtgcgctatgctggtgtttattgttctccacttagtggagaaagaaaaaaaaaggaaattcttagaaattcaaatgagtatgaaaaaatgtctttcttttttgttttgttttgttttaagacagtctcagctgggcgcggtggctcacgcctataatcccaacactgggaggctgaggtgggtggatcacaaggtcaggtgttcgagaccagcctgaccaacatggtgaaaccccatctctactaaaaatacaaaaaccagccgggagtggtggcacgcacttgtaatcccagctactcaggaggctgaggcaggagaatcacttgaacctgggaggtggaggttgcagtgagctgagatcgtgccattgcactccagcctgggcgacagagcaagactccatctcaaagaaaaaaaaagaaagagagtctcgctctgtcacccgggctggagtgtggtggtgcaatcttggctcactgcaacctctgcatcccggtttcaagtaataattctcaggcctcagcctcccgagtagctgggattacaggcaggagccaccatgcctggctaatttttgtatttttagtagagatggggttttaccatgttggccaggctggtctcgaactcctgaccttaagtgttcctcccgccttggcctcccaaagtactgggattacaagtgtgagccactgtgcctggcctcagaaaaaatttctttaatctataaaaaagaacatacttagaatctgcgagtcagagacagagaaaactagacagtgcattggaacttgtttttaaatcttattaacgcagttcctatgtgaaatctctgtaagctgaagggatgctcctgagggtaaattctggtcctggttgggtgatacagcactcctgatattccttcccaggtgtttctaccccaaagtgtgcccctccatccctcctccatcctctctgccagatctggtttgattccagtgcctcctgggcgcactccaaatggcctctgagagagagttaccactgcagatgcattggagtactcagagttcactggcccactatctgcaggcagatgcagaagcttgagcaatatcttgagcagataccttatctctgataaagctctcctgcttaagaattttctaaatgatatgtccactctgtatactattcttatttgaagttgaaactgccaccatctactttaagagtataggaaatttattacataatgtattgttgtacataaaataaatgtttcaaaatgtgtattaaatgttaaattcaggccgggcgtggtggctcacacctgtaatcccagcactttgggaggccaaggcaggtggatcacctgagcttgggagttcgagaccagcctgaccaacaggcagaaaccccgtctctactaaaaatacaaaattagcccggtatgatggcgcatgcctgtaatcccagctactcggaaggctgaggcaggaaaattgcttgaacctgggaggtggaggttgtggtgagtcaagatcacgccatgcatggcagcctgggcaacaagagcaaaactctgtctccaaaaaaaaaaagttaaattcaatgaaggtcttaccggtttagggtggctctccctgagttgtctgaggtagagcatctgtgcgtacgttttaaggaagtgtagtgaattgtagaagatcagttcttacctgaccttaaagagtgggtgtttttggagagaggagagaaatttgcatctcttgagtccctatgttatcttagtaacattaggccagttctctatattggccccatttctgatcttttgaaatctatgagatacattttaaagtcttcacactgctcattgaaaccctgacaaattaaagctcatgttattgaaggtttttggccaagttaaaaaaaaatatatatatatatgaattatatatcaataaagcagatacttatttaaaaagaagaaaattgaggggcagaaaaactgggtaaaattgcaaagaaatggtaagttaccgatttgtgtcagtgacactttcctaggctgatggctgttatgtcctagatgtcatacaaagcttcttacttccctcgcgactctgggctttggtcctgatgcctttctgatttgaaatgatgcaggaagctgggtttctttagcagggcttggtgaccagttcaggagcttacatatacatttttcatcattgtggtaggtaaaataatgcccatccaccaaagaaaaatagatctaaagacctggaaactatccatatttccttattttggaaaaaggtctttgaatatgtgattaaaataaggatctcgaaataaggagattgattattttggattatcaaggtgggctctacatgacatcatgtgcatccttattaagagggaggcagagagagattttactacacacacagaggaaatgtgaagatggaacagagagaaatttgaagagatggccacaagccagagattgccaacagccaccagaagctagaagagagagcaaagccttgctccctccttgatttccacctggtaatactgattctaatttatttagaaaatcaatttctgggtcaggcgcggtggctcatgcctgtaagcccagcactttgggtggccgagttgggtggatcacctgaggccgagagttcaagaccagcctgaacaacatggagaaaccctgtctctactaaaaatacaaaattggccaggcatcgtggcgcatgcctgtaatcccagctacttgggaggctgaggcaggagaatcgcttgaacccagggaggcggaggttgcagtgagccgagatagtgccattgcactccagcctgggcaacaggagtgaaacaccatctcaaaaaaaaaaaaaaaaaaaaaaaagcaatttctgttgttcaccaaccttgtggttggtactcatgacagcagccataggaagccaatacaatcatccactgcagctccacaccaagagctttgataaagatggcagcagatgctttgcttgtcctcccagggagtgttggaatctgattgctttcccttcgagtctgagttgctctagtgagttacttgacctagtaggatgtgggagaggtgatgttctgggactgctgaggccaggtcagaagaagccttgtagattcttcctgggtctctggagacagtcactcttggagcccagtaccatcctacatggaaatccaagcagctccttggagagaaatggaagtccccagccctcaagcccagctgagcactgtcctgacagccagcacagctccaagctctgagaaggagtcattctggagtcttcaacccaagtcagaccacctctgccaatgctgtgtgtgcagacaggccagccttgcatcaatgctgtgtgtgcagacaggccggccttgcaccaatgctgtgtgtgcagacaggctggctttgcaccaatgctgtgtgtgtagacaggtcggccttgcaccagtgccgtgtgagcagacaggccggccatgcaccagtgccgtgtgtgcagacaggccggccttgcgaagccctgccagaactctagattggtgacccagataaccatgctaagttttagggtagtttgttacataacaaagagccagaacaagcttaaaaaaaaaaatccttcaacctgtcccaaatctacccatctgatttaaatggcctggcctgggataagtatgtgattctaatgtgctggggttgggaactactgaataattttgccactctgaatgaagaatttggcaatgctacattttttttaatttatcaaaactttcctactttagccattgagtattggtgtgatatatagggtgtcctaactccaccaacactctgagcaacaaagtattaaataaatcacactattgttttctgtactttttaagctctttcttagaaagttttgggtgcagattatgtttttagtgtcttttttgtttgggttgttttactgttttatagaatagtgaaatttgtgtgttaggtcattagtcctaaataataaatgaaagtaaatctacagtcccttctatttctctgacagtgccagacttcctggtcaaatcaatttttttttctactgccttcagaagagtttgccaaagtgtctgcactcttgctggttggtcagggagcacccatggagccagcattgggctttggactccaagcatttgtcagatgcctccactggctacatccccgactgagcctggacaagctgggccaggactgttgaaggacctgtggagaagcccagaggcaagaatagaagcgacaggctgggcgcagtggctcacacctgtaatccctgcacttcgggaggccaaggtgggcggatcacttgaggtcaggagttctagaccagtctggccaacatggtgaaacctcatctctactaaaaataccaaagaaatgagctgggcgtggtggcagacgcctataatcccagttactcgggaggctgaggcaggagaattgcttgaatccaggaggcagaggaggttgcagtgagccaagatcgcaccactgcagtccagcctgggcgacagagtgagactctgtctcaaaaaaaacagaatagaagcgacatgggtaatgtgacctccttcctagcatcacgtccctcccttccagatagctatcagataactgccatcttccccttctctcctctctgtctccacgacctgcaagatgcccatctgagacttcagtagaccactgcccactccctacctctgtgtttcctcagtaccttcctccctactgcctcttttctttcttctggctctggcccctgctccctgcacttgcctgctggcttgtccatctgttctgttgcccctgcttagttctagcctctcgtagcctgaaacccacggatgtcaaggccctgacagcatctatgaagctgccccacagaccccatcaaaacgtccttggatcccgatgggccggcgatctgccacggagatccagctacctcaggccgtgattctcagaagaccaacatacagctcctctttgcaggcctgaaacccgacgcacctactgtcattacacttgctccaccgtggtctgatcctcaggggttctctaccagagccaggtgacagcaacccgaatggtctatgggatatttacatcagggccagcagcctcccttgagctctgtttagtgggtgacccattctcaacctgtgcttgagagctgcactgcaaagggcttgtcccacccctgtggactttaatctagatgttcagtaatttggaaaaggcacacttgattgagagggttctagaataattcgaactgtgccctatggtataccagtttccactggtagttggttatattatgaatggggaggagggtggactctgatgtctaataagttcctgaagcacatgatcaacacattgaaaccagtttctttagtgtatgacttcttagagtctttaacatgctgttacaaggcacagacctccacagggggctgtagcatgtatcatttcccaaatttagtatatcacaacacctgagataaattgaaccagtgccccaagggacttgtttttgtaattgcagatgtggatgtcctctgtagatcctgtggtggagggttgaacagcacattaaaatccctgaggccaggtgcagtgactcacacctgtaatcccagcactatgggaggctgaggcaggaggactgcttgaggccaggagctcaagaccaatctgagcaacccagtgagacatcatctatacaaacaatttttaaaaattagccaggcatggtggcacacacctatagtcccagcttagtcagaaggctgagacgggtgaaccccttgagcctgggaggtggaggctgtagagagctgtgatagtgtcactgcactccagcatggatgacatagtgacacgctgtctcaaaaaaaaaaaaaaaaatccttgaaagagattatgtcatggataagtgatgcagtaattttacttcagagcttgaacctatgataagacaaacttacctagaaagtcttctgcgtatggatggaaaatgtgactcctattttggtttagggttgtctacatggagagggatgttttggtccaggccccttatcagcctcctcccctggacttagacattgttggatgctgggaccaagtctgaaatgttgtcagaggacttggcctttatgtgtactggagaggttaaggtgcttcgtcgctacttactgaagagaggagttacttccagaaaagctggaaaataccgaattcaggcctcactgggtgtgtgtaggccaggctaagtcttaggagctttgggtccccttttcactcacctttgctgtccgggacatcatctgctgaccctgtggctccctgccacagttcatcttacagtccctgaatgtgcacgcctacagtgggtgtttgggaagcttctgtggatatttgggaagctaccaggtttccctgccccctctttcttggctggcctttgccaaatgtaactgatctctagaacaaaaaccaaaaccttccaaatctctatagacttgaacacttcacagccatgtattggctgacacctcccctggctaggattcttcctgaccaggagtcaaaaacagcactgcagatgtctgatcttcagaggtccgttctgctaaccccagacaactcagctagaatggtccacagcaaaattctgcccggtgataagtgtattctacctatagatacctattcttcttggagctgggatcttccaaattttatattttggcttttttttctccttttttctccccctcttcttccttctcctcctccttcccctgccccaaccccagcacccttcttcctcatttttttttttttgttttgctggggcaggtctttgtttctctttaatttttgtaaggtctccatccagggtgtgtcaatgcctggacactggccagggttaaacttcggggtgtgaatcagaagatcctgatccacaactctttttgcttttttttttttttttttttttttttcctgagatacagtcttgctctgttgcccaggctggtctcaaactcctgggctcaatgatcctcccacctcagcctcccaaatagcatggcccataacttttagtgggcagatacacaatagaatattgtacactgtggttgcaatgtctggaactgaatttgtccacgctcccctcctgcctcaattcctcaacaaagacaggcttattctgaaccctgccatcatggagtgcccgggaaggcatttttctcacatggtttccttgcttgccccatcacaataccagtgaccttctcacttcgagtaaaaggaatgacccattttctaagttcagggggcttagaagtgagcagacaacatcttctactggtttacccttagctgctctaggtgatcgctgagcacctcctcaccaacacatcacttcattgcttccctcttgaaccctgagccgtcgttccactggtcctgggcctaatcctctccctgtatggtctaccaggttgcagactttaaaagaagcatgccatttcatctccagcatcaacgagccatttatagttcttctctttctacttctccctgcttacacggtgtgaaagtcataaccctataaatagccctgcatgcagagtcttgagctttggaatcaggctccctctgagttcaaatcctggttactgaactctgaatgcctcagtttcttcatatgcaaaatggggaaatcatggtaagcaccgacttgaatcattctgagcattgaacgaaatattgcttacaaagtgtttagagcaaagctcagcacatggtaaatgttagctgttcttagtacaggaaccagatttttgagtgacatcctcatgtttttaagggggcaacgtggcggggcccactttcccactgatgaggcgtcccgatccagccctttccttgccacctcgggtgcttgaatgtttttatctgtctccaccttaccacgagcaattgagctaattctacaagcaagagatatacaaacaccaagggcttcgtgacaaagcacgaaatatcctaacagccaaggacagctgacggttgcaggaggctccccaggacgtggaaaaccctgtgtaagcaggaagtgctgtgaccattccaggctgagcctcctgcgccctagtgtattttgttttccaaagaacctttcagacaagatgacccttctgactcctgcctcctttactgccccaatgacctgggttgggcagtaagacttagaagggtttgcaggcatcccctctttatttgtttgttccttaagcttggaatcatctaagtagcattttagcaagcccctattctgaaacccaaattgggtcatccaactcagcagagccccgcgagactaagaaacctagggaaatgggactgataataaactccagtcctcatttttttccagtccccattttttgttccctgttctatttctttttctttttcttttatttcttttctttttttttttttttgatacagagtctcacactgtcgcccaggttggagtgcagtggcgccatctcagctcactgcaagctccgcctcccgggttcacgccattctcctgcctcagcctcctgagtagctgggattacgggcacccaccaccacgcccggctaattgtttgtatttttagtagagatggggtttcacagtgttagccaggatggtctcgatctcctgacttcatgatccgcccaccttggcttcccaaagtgttgggattataggtgtgagccactgcacctggcctccctgtctatttctatcagagaactcaccccaaaatcttttgatgtttagggtcactgttaggaagggaagaaatctgatgagaaacctgataaacccaggtgacatgggccagatggggtcttcctagcatctctatcatgctgtgcctgatgtcagcagtagagtatccttttcccccctttatcaacatattttagacctgcgttcattctctttctttctctgaggagattttcaaaaacaagtcatatgcgcttggcacctataagcacaaagcattctcattgacactacatcttactgatttcttagtaagagctaagggctttatggccacagtttcattggctccttacaacaaatcgaaggaagagaagcatattattccattttacaaaggatgattcgaggataatcagatagaactcctccatattatagagttagtcattggaaaatctaggattcatacccaaattctctgctttcaaagccctgctgtcctgagctggagaggctgtggagtcaccacgttatacccaaaaaacacaagccagatactaggcctttatattccgtccatcaaggtgttgtctgatgctctgcatctccagcttgtccacatcataaaacaccattggcttagctagctagaccctactacaacccactgtatgaccgctcagcttctgccaccaggtcatggtgcaaggacatgctaaatacatctcagcactcaataattgataaactatcttcatggaaatgccggaaacaggaagggaggtattagctccattctatgggtgaagagagagctctactgagtcagcaaatggttaactgggactagaggcctgggtcgttctagaacctattccatgataccatctcatgaaaaatacccacgtttccattatgataaatcctatgcaaatataagatgctggcaggcagggaagattgttcttcagtgggtctaccttgccaaaatgaggacttatcacctgactcccatcctgtgcatctcaatgatgagcagtgtcaattctggattccctgccccttgtcttcttactctgagagagagcagtggtccagcctgggtaacatggtgaaactcatctctaaaaaaattatgaaaattagccagatgtggtggcatgtgcctgtattccaagctactcaggaggctgagatgagaagatcacttgaacccgagaagttggggctgcagtgagccatgattatgtcactgcagtccagcctgggcgacagagcaagaccctgtctcaaaaaaaaaaaaaaaaaaaaaaagaaaaagaagagaagagaaaagaaaaaagaagcagtggagagaatcacctcaggttccactccccagattctgtaggctccctacctcctgcttagtgatttctaagccctttgcttcacatagattcttgctggcctctgacttcttgctttcaccttgattcaactataaagggatctaaaagccaaattgttttcagttttcagcagaagcctgggaaatctttgccatctagattgtccttaggtatccatgcagggatgtctgctggagtcagatatgttttattaattccacttctttattgctcctttcttaagaaacagcagcagtgccttgattccagctactgtttctttatgcaataaaacaatgaacagaagcttgtgaactgctgatataaccttctagttggatccccgatctgtgaatagattccccttcttggcagcatactgagcaattttattatttctgtcttcaggttgagttttatctagacatttgaacatttacatataccatcttgctttggaaggtaaatgcacttttaggcttccaacagcattgctgctgccgttgtgattgatttactgtgtaaagatttatattactgtttgaaaatgtcagtgaacatttgatgtgaattcacagtggaacatgtgatgctccctcttatgagaaagtcatttcagctgggaaagtcgtgattgcatatggcactgtagcctctttacaagaggagaagtagcacgttgaacccatatttctcagttgccgaagtttgccagtgttatttagcaagtctcgcccagtacctaccccatgcccaagctgacaccttcccttggtaaaccagaagatcaccaaggaggctggtgtctgagattcctgatgctagaaggtactgttggggaaatagaaggcatcccccaccagctttggcccagaccttctcaccaggtgggaaagcctttttcaagtagaagagaaaggggcaaggaagagaaggtggggtaggacttagatttttaggactccttgtgctggtcaccatgtgaaacatctcacatgcccgaaatcctcaccaaccattgcaactaagtggtatcagttccgttccctaagaggaatgttaagctctttgttcttttcatcctgatacattctgaagcctgcagaccacagttcgatgatcttcggcagcccgctgtaaataccaggggatgtaaccagactgtgtcccagagtttcaagtggcctccaaaagcatttctgggtatcgtataggaagtgtttgtttattggtagaaggttctcagaccccagatgactttggaaactattgggtccaggaaagagacatccctcccctttccctccatccctggtgcctccttgaagccatccagcggagatgagaaataccagcaatcgtactagacatgagaaggcctctggtgatggaaggaaggggatcaggaagccctcccatgccagtgtgtgcttggtttcagcatcactccccatatttccttaaaacagctaaatcccaccatcccaccttctgcaaccaaatctccatacttgaactttttctgttattaaatcttgctgtacctctacaaggtaaatatgacctttctaggtgagcaggatttcatggtgtaatagttttgtgcttctgactagtgtaggtgaccatttggcagggaggaggtgaaagtgagcacatcatagtcctcatacacctatctctctgtgcagatacgtgatagagacaaatgctggttgggagtatatgttttctccctgaatgaatgaatgtttctcccttaatgctagaaatgtgagcccttaccttagtcaatgagtcaatgaaaccttggctgagatgacagcagcagtacctcctagaccagaggaaagggaactaaccacctgctagtctatgtaacttagaagtcagtggataaggccaggcgtggtggctcacacctgtaatcccagcactttgggaggctgaggcgaatggatcacctgaggtcaggagtttgagaccagcctggccaagatggttaaaccctgtctctactaaaaatacaaaaattagctgggtgtggtggcgggtgcctgtaatcccagctactcgggaggctgaggcaggagaattgcttgaacccaggaggcagaggttgcagtgagtggagatcgcaccattgcactccagcctgggtgacaagagcgaaactctgtctcaaataaataaataaatattttttttttttttgagacggagtctcactctgtcacccaggctggagtgcaccgtcgcagtctcggctcactgcaagctccacctcctgggttcatgccattctcctgcctcagcctcccgaatagctgggactacaggtgcctgccaccactcccggctaattttttgtatttttagtagagatggggtttcaccatgttagccaggatggtctcaatctcctgacctcatgatccaccagcctcggcctcccaaagtgctgggattacagatgtgagccatggcgcctggtcataaataagtaaaatgtttttttaaaaaaagaagtgagcagatgactacttttaccagtttctttcttccttctgcctctttcttccccatgccacaccaatatcaactcttcagctgctctctttacctgtgtgcatggtagggtatgacttacacttacacaaataggagagtcactttagagagaccaactaaattgtaataattttatagcacaataaaaatcccaccccaagaccctggaccatggagagagaccccttacagaaagacaacctttatgtccaaaggaaggcctagattttttgaaactaatatctgtatgtttctgtccctgcagccttaggaaaatccaaaggtatggtatcctctggtagctatgaggccatgctcagtctcttcaactgagccacctatgcatcgtagtgagttccaccagagggtgaatgcgccgcgtctggttgcttggccgacttatttgaagctgtgtgcccatcattaaaatagaatcagagcccagagggaccataggcacaagcagccccttccctgctgtgtagacaagtgggagtggcctgcagaggtgtgccttggccagggtcccagcagtggtggagctggggctagactccaagttacaaaaagaaggattcatatttagatgtctcctgctgtcagttccacgctccccccttcgctgcccctcccacctcgtcttgcacttgggaggagtgagtgtccctgcccccccagttaggccacacaccgctgtgaggaaggctggcagtttacacccagggagcttgccgggccatcatcctgagctggctttggcagagggttgaagcacagcttgtggccgccagcgctgccgactgtgccctgctccttgcctcagtgagggggccgctcttgccaggactgggctgcccagggctgtgtcttggccgccgggagcagccagggtgctgggagcacagcccccaatgcatcgcttcccgggcccccggggtgctaaagctgcgctgctcttctcccaacgcggacctgcttgaatgtgggggagggagcctgtctcctgtcatctgttacgcgtgggtaagcggtgtctttgtgtccctcgccagcatgggtgtgagggtcatggacacaaactgggtggctcgaagaggctcctcggccggtcggaaagtgtcctgcgccccgccctccatgcagcctcccgccccgcccgccgagctggctgcgcccctgccttcgccgctgccggagcagcccctggacagccccgcggcccccgcgctctctccatccggcctgggcctccagcctgggcccgagcgcaccaggtaagcgcgggccactgccgtccgggcgggctggtgtgcggtgcagggggtgtctgggttggccgcactggaggcctcttggatttcgtcgtttcccatgcccccgcccccatttctaagcattcatatttggcttctgcgtcgcgctggcaccaagtcagtcatccacagctgcctggattatcacacgaagtccagtcttccccagcataacatcgcaagcaagcagaaggtggcagcttgcgaaggcagggtgaagagtcttaggttccccaactctgttttccccttcctctgtctttgtcgttacagtggccccccatatccgtgggagatacatgccaagacccccagcgcatatctgaaacagctgatagtcccaagccctatatatactgttattttttcttatacacacatacctgtgataaagttttaatttataaattaggcacagtaggacataagcaataactggtaataaaatagaagaattataagcatatgctgtaataaaattatgtgaatgtggtgtctctcaattttttttttttttcgagatggagtctcggttggtcgcccaggctggagtgcagaggcgcgatctcgactcactgcaacctccgccttacaggctcaagcgattctcctgcctcagcctcccaagtagctgggattacaggcatgtgccaccatgcttggctaatttttgtatttttagtagagatggggtttcactatgctggccaggctggtctcaaactcctgactttaagtgatccacccgcctcggcctcccaaactgctgggattacaggcctgagccaccatgcctagcctgaaaatattttattgaactgtacgcacctatttggaccacagttgaccacaggtaactgaaactacagaaagtaaaaccacggataagggggactactgtatcctattttgaagtttacaatttctgtgtttctccttctctttatagtcatagcagccacttttttttttcttttgatgccgctaaaatgggtgcaagtcagggaatgaatggaggtggcggttgtactgggcctgatgacctttgcagcttgccacatggttgaattgccattattttaggggaaggaaaaagacaggaattcattccatgggtagcttgatgaatattaactgataactttctctttttaaagataaaaagatggccgggcacggtggctcacgcctgtaatcccagcactttgggaggccgaggcgggtggatcacgaggtcaggagatcgagaccatcctggctaacacggtgaaaccccacctctactaaaaatacaaaaaattagctgggcgtggtggcgggcgcctgtagtcccagctactggggaggctgaggcaggagaatggcgtgaacccaggaggcggagcttgcagtgagcccggatcgcgccactgcactccagcctgggtgacagcgtgactccgtctcaaaaaaaaaaaaaaaaaaaaaagaaaaaaagacatgattgctgcccttaaaaagttcacgttccagtgagcaaacaggccctgacaaataatgacagcacttggttatgcatacccagggtggcaggggaggagacagtacctggcccttccttgaaaggggcatgatcaggggaggcagattctggatgtgagaattgcaccatgaaacagctttgctgtttgtttctatcttttctcaaacagcaatttagaacaccagaaaagcaatatgaaatcacatgccaccgtgtctcctgttagaagacatggcattcctccatgaccactgccagaaaagttttggagactttgggaagctgaatcttctaacccaaatctttctccaaacacacatgcatacacatggacactcatcctcacacaccatcaccaccagcacacaaacacacacccacacccacaccaaccccctacatgagaggcttccaggcttttttgttttattttgtttaatgagtaaaaagtattttcacggccgggcacggtggctcacacctgtaatcccagcactttgggaggctgaggcgggcggatcacctgaggtcaggagctcgtgaccagcctggccaacatggtgaaaccccatctctactaaaaatacaaaaattagctgggtgcagtggtatatgtctatagtcccagctactcaggaggctgaggcaggagaatcgcttgaacccaggaggcggaggttgcagtgagccgagatggtgccactgcactccaacctgggtgacagagcgagactctgtgtcaaaaaaaaaaaaaaaaaaaagtattttcactgtaaaaccaggaaatgacaaagggacagggggttagatagtcttagagcataggagggggcacctgaccctgggcatgctgggttgctgttgatgacttcaactcagaggatgctcggtcctggctgtgtaattgctaggccacagatggacctgagagatgcagatgcgggcacagtgagttcattggagaagcagagtctgagagtggtgggccaggtgaggccgaccaggaggaaacggacccacaggcgggagatgggctgggactgcttcctttttggacactcctcagcttcatcctagtttcccatcttagaaaggggactcagtgccatatggtatttggcatataaatgatatttctaaaaagtgctccttgaagatggattcccccaggctctgaaggcattccaggaacattctcggtgggtgaccttgcagagttacttgtgggcaggcaatggcaccctctggtttcgattattttaaagccaactcacattgctctatagccaaatgtctttcccctttgcccgggctgaccggtttagtaacttttctttggatgttagtgttttgtgttttacaccactttttgttctctccccgcatgggtttctcccagtacaaacaggtgttccattgtttttgtttgtgttgtttgtttctgtttcctggatgtttgcagcccagatgatgttccctcgagtggccggattctcgttctggctccccctcccctgatggcaggcccttccttgcctctgactggttcccaccttcccactccctaccccaggccccaccttcagttctttccctggctctgtccagccaggctctgcctccacatcccgcccaactgcttagcatgaatgctaaccccaaaattctccttcctgcttcttggcaccaaggtcatgggctgagtcatgcatcttcagagctaacttgtcctcaaacgtgccttaaacatgccttgttcaggtagcgcccctagtagccgccctacgccccacctctccccactgggtcagctgcacctatgctggagaaagaggacaaggctaagtgggtaaatacttgtttctgtgctggaggaagtgtgtccgggccgggcgtggtagctcacgcctgcaatcccagcactttgggtggccgaggggggtggatcctgaggtcaggagatcgaggccatcctggccaacatggtgaaaccccgtctgtactataaatacaaaaattagctgggtgtggtggcacatgcctttaatcctagctacttgggaggctgaggaaggagaatcgcttgaacctgggaggcagagatgacagtgagctgagatcatggcactatactccagctgggcaacagagcaagactccatctcaaaaaaaaaaaaaaaaaaaagtgtgtttcgtggcagggaacagaaggaagagctcattcctagattccttggatagatgtgtgtccaaaggaaggaagaagagtctacccacccacaagaagcaattttttagtttgctgattatgagatgtttttgattggttgactggccttcctcttgatagtggcagagatagatggaagggtaggtagatatttggcattgatgcccgggtacctggtaacctgcagcctgaggtccttgtccagcctgagtgaggcaagggttttctgtttctgtttttcatgaacagaatagagaaaggaattactgctcttttggttcctctgaataaaatggtttttgccccttggggaactaggtatagtgtgtaagactcatcccaagtgggagagaatgtgcctccacattgaatgtgatcttccttttatttctttgcatgaggaaaatgacctgtgctttgacgctatgggcttccccggcccagctccctgctcccagtctttctcacctcagtggacgagagtgctctattcctattggaattttctccaaattaacacctggagtttctagatcagtttaggaaagaaataggctgtgcctgccttttttttttcttttcttttttcttttttctttttttttttgacagggtctccctctgttgcccaggctggagtgcagtggcacgatctcagctcactgcaacctccatctcccgggttcaagccatcctcctgcctcagcctcccgagtggctgggattacaggcacatgtcaccacgcccagctaatttttgcatttttagtgtagacagggtttcgccatgttggccaggctggtctcaaactcctgacctcaggtgacctgcctgcctcggcctcccaaagtgctggattacaggcatgagccaccatgcccggcccaggttgtgcctgctcttgtgggatagaaacagccattgcagaggatttgggttcccagactcttcatgccccacctgtgggcatcagaatccaggtaggttctagcacggatgacagatggctcccaactgtggggcatctcccctgattcactaaaggccacctggagaattttcttggaaaggattgagaacactgtgggggaagtgtggagatcaattagtaatatctaccatcagcgtatcaggatgacaaatccctggtttgtggtgtagagtgaggtgtcttctaatacgtgcttcatcctcagaagaaggctgaggaacagccttgcagtaacgatgaatcctctttaggaaacctggtgacctagggtgcctcattgtcaattccagaggtcagaggccagagccctcactgccatcgaccttcacctctcttgaagcctgggactgggactcaaactggcccacatttaagggcatggcctggatttctgtccaccctagcttctgctggaatgggtattgagtttgaggatgagtcctagaatccctcctgcctggggggtggctggaggctcagggcaaacagctggagagctgggccacaagcttggcagcaggagtccgtgtcatcagcactcgttgggcacagtggccctgagaagtcctcttggctacagtaggaaaagcactttggtgttccagtttgagaatgttctagaattcctgggttgatggcaggatacggtagaggtgctcaggcccctgccctcacattgctcacggtctccttgaagagaggagggcagaggcatgaaaagggcattggcagtgagtgccaagtgccacagagatgggggcagaacccaggccatcagagctccaggaagggcagtcaccccaaggggcacctgcgaaggttttaggaaggggccaagacagaccagagctgggacagacttgcacggggcccagaaggacacacagggtggccatcggcaaggctggtgctgccgctcactgagttcagggcttttcttttgtctcatgtgctttcgtttcagcacaacaaaaagcaaggaactttctccaggctctgcacagaaaggaagtccaggctccagccagggcacagcctgtgcagggactcaaccaggggctcaacctggagctcagccgggcgccagccccagccccagccagccgcctgcagaccagagtcctcacaccctccggaaaggtatggccctgcttcccttctccttggtctcaggccggaggtggctgtgacattccctgaaggctcgttttcctctatgaacttggatattgagaaactgtgtggtttagtgactaattcccatctggacattagagctttggaagttaaaagggatcctttctctattattcctcagtttacttatttgacaggtgggctcattaggggcgtatagaggccagtgcttcccatacaccaaatgatgccaccagggcaaaattcattgtccacaatgatgtgtgttttccagagacctgccgggccctacctctgtcatttgaaaagctgtatagggtcatctacaggagtctccttccccgcagggcagcctggcacagctgcctacccctagatcactcgtacagggtgacaggagggagtcaggatagcttctgtagtacctgagtctcagctctgaatggcccaagaatggccacactgaccagttattatctcttcagataatcacttccaaaagctaaaggtatgctccatgtgacatttcataaatggggagctgtactgagcgtacttatctgaacctttttggtttgttcttacctgtgtcatctctttgcagagtctttcactcgtctaaaataatacatcatcctgtgtgttctaatttcagaccactcgcacttctaggagcggcttttaactcctggatttgtcgaatagggcccggatttagctcatccacatgtgccttcatgacaggcccttttccagcccccttagttccgatctgcagtggcagtttcattctctttgtctgccctcaccaagcccgtggatcttattcgatccctactcattccttttgcattctacacaaatttattaaatcctgctatgtacagagctctgtgctttccagagaggaaggcaatgataaggcaaaggtgttggcactgtgctgggagacactcagggtactgtaaggacacctgggagcatgctttctcgactcaggagttaggacaggtggcccagcggaaacgacatcgtgaaggttgaataggagttgggccaaagtgccggcgtgagatttcagcatctcagagcatttctccagcaccaatggtttctccttggtctagatgccatattcttggttatgtcttttttttttttttgagacgaagtcttgctcttgtgccccaggctggagtgcaatggcacaatctcggctcactgcaacctccgcctcctgggttcaagcgattctcctgcctcagcctcccaagtagctgaaattaaaggcgtctaccaccacacctggctaatttttgtattttcagtagagatggggtttcaccatgttggccagactggtctcgaactcctgacctcaggtgatctgcccacctcggcctcccaaagtgctgggattacaggcgtgagccactgtacccggccaggcacctctttgttttagagtcctttaactggccggacgcagtggcccctgcctgtaatcctagcactttgggaggctgagatgggcagattgcctgagctcaggagtttgagaccagactggacaacgtggtgaaacccgtctctactaaaatataaaaaaatcagctgggcgtggtggtgggcgtctgtaatcccagctactcaggaggctgaggcacaagaattgcttgaacctgggaggtggaggttgcactgagccaagatcgtgccactgccttccagcttgggcagcaaagcaaaactctgtctccaaaaaaaaagagtcctttaactttccccacagcactacaatacaggggtgatggctaagtcattgtctcgtccagtgggagagccagggctcctgtagcagccacccagcctcctaatgccagtgacaggttgacccttttcgtttttgcagcacattggacctaggcagccagtgtagcctagagtgactcaggtccctttcccaagtgaccttcaatagctcagacccatcttttgaaaggtatacatttcttctctactccccatcatgcccacagatggcacacttagcaggtctttttttttaatttttttttttttgacacctcagtcttctgacagcgtgccgacaatttcacatcctattcctgtcaccaccggaagtggtaaatgtcatcacagacatggtgatgcatcctctgtcccccagctccttcgtgagaaggcatgtgcaagcattgatacctagggtctccacctgcttctcatccaggggtacccctgcgtctgtcacccatgaccacgtggctgccatgagctgcagtagcagctgctggaagcacttcccctgtactcaggaagtagagttgaaaagtgaaattggaaagttaagtggttttattatgtcatgattatgtggtacttgacatgtatgatctcatttaattattacactgctgcagagaaaatctttttcctccaattgcatagaagatgtttgaataagttgacccagggaatacagcgggtaagtggcaggatagaaatttgagcccacgttggtaggattctgaagggcatgtccttctgtccacactgcagactgacacacccagagaatacatgaggtgtcctcctaacagaccttgttccttggagggagtgggggtggggtggggagaaggaagagcttctgacctctcccttaggacttacaagataattccttctagaatcagacccacacacatggctgggcaccgtggctcacgcctgtaatccaagcactttggaaggccaaggcaggtggatcatgaagtcaggagatcgagaccatcctggctaacacagtgaaaccccatctctaccaaaaatacaaaaaattagctgggcatggtggcaggcgcctgtagtcccagctacttgggaggctgaggcaggagaatggcatgaacccgggaggcggagtttgcagagagccgagatcgcgccactgcactccagcctgggtgacagagcgagactccatcttaaaaaaaaaaaaaaaaaaaaaaggaatcagacccacacacagccagtcctcacttaagcctaacaggttagtgatcactctctcaagatatttgcccatcaagtatctcctggacgtttgaatttattgtctttaccaattcattttcaattaaaggtataatggatttgtcatcctatagggagattgggaaaaggataatgaaggtaaggcaaaggaggtcagggcaataatgtactttgaaaaatgcggttgattggccgggcgtggtggcttacgcctgtaatcccagcactttgggaggccgaggcgggcggatcacctgaggttgggagttcaagaccagcctgaccaacatggagaaaccctgtgtctactaaaaacacaaaattagccaggcgtggtggtgggcgcctgtaatcccagctactcaggaggctgaggcaggagaattgcttgaacctgggaggcggaggttgtggtgagcggcgatcgcgccattgcactccagcctgggcgacaaaagcaaagctccgtctccaaaagaaaaaaaaacaacaaaaaaaccccagaaaaacaacgaaaaatgcagtcgatccatacatgcttagaccagcgggtacaattctaggaagaaacaagaatgagaagaaagcctcagcagcagggatgcaggattgaggcacagcatataaagtaatgaaggaacaggggttctgtggccggaggatttgctcacatatcactgttaggggagccagaagccactggacaggttcagccaaaagtcagttttctatcccgaggacctgcccctgtgtcagggctcctctgtccattacagcaaattgaactggagtcatcctctgctggaccctgccccactgactcactcttgctcagagagtagcagcgatgcctctcaccactgggaaggcagcccactcctgtggatgggaaatttgttctctagtttggctgggtgtgcgtgtgtagatcagggcagaaatccagaaaagaggaggaaaaattagttaacagatgggaagataggaaaacttgcagttctcggttaatttttaaaaattgtattggctgctgtcaatgtggcaagaggccggggggcagggcagggaggtgtgggtgggtggcgaggggcaggaggtggggacagctttgaacgctgaagggtgtgtgaacaggccccacaagtggcttcattcaacaactttgtgttttgttgttgtgttgtgttttctctttcagtttcaaagaagctggcaccgattccacccaaggtcccctttggccagccgggggctatggcagaccagtccgctggccagccgtccccagtcagcctgtcccccaccccgcccagcaccccgtcaccctatggactgagctaccctcaggggtactccttggcctcgggccagctctccccagctgcagctcctcccctggcctctccttctgtctttacaagcactttgagcaaatcgcggcccactcctaagccgcgacagagacctactctgccgcctcctcagcctcccacagtaaacctctcggcctctagtccacagtccacggaggcccccatgctagatggcatgtcccctggggaaagcatgtctacaggtaaccaagccacaggctccctcacttttttttatgaactttagtgaaatgtgcctaggggagggattgctagtgttactgccagtgaacacattcctgcgtgctttgggatgactgggctggcaccaggggtagctcataagatctccttagaagcccaccaatggaaagcaaccctggaatccatgtgtcccacacaggggcttcttatgggatctctctcggtctaagcccaccagcctggggttctgtttttgctcttattatcgggggttgaagacactgagtcatttggagtggggcctcaggagaggctggaagctggttatgatcacaaaacagcatcaaaactcaggtatttcctggatagagcccaagcaactgacaggtataaatgcttatctggagaacaggggctaagaacccaagatgttttttactattactaaaataagccttgctagaaaaatatacttccagatagatatttagagaggggtgaatttcagaaaacatgcatgtctccattctcctccaccagactcccctccctggccaattccctgaggagctaattggacaaacccacaacgacttaatttagtttgggcttaaatttagaaacaaagacggagctctcttcccccagaaaaatctgtaagcacaaaatcgcaaacacacaccacgtttagccaaaaccattcattggctggaaggaacgggatgtttttggaacatctccccagacacttcaaccacataagattataaagtcaggggcctatttgtggtggctgctaaagtcatttgagcattttccttgttcagggagacaggcacagggttgagctgtgtcttgggctagagccaacccacttagtaaagtgcagtagcatggcggtgagctggagcatatgtgtacctagtgttgtcccaagtagcagaaggtgaggcagcttgggttggaacacacacaccacatacacacacacccactcacccatttcaaagaacagtgctgtcctaggatgcactgggactttttgtgataatgcacttttccctccacgtccttctccaaaagagtgatttatttcttccgtgattagacggaagcagtgaccctgtggggttcagctccgtgctgcctttgaaaaggctagtccaatttgcaagtgtttgtactgggtcagatttaaatattacggggaagagccatctggtgattcggcttctttatttttggatgtgattaatgttgaaggtacagctgctgtcatctaccccgaggcttattaaaaattaggcaaatttctccctggaaaatgcagtagcaccacgcccatcttggtgggtcttggtgctgaggtgtctcctgaaggagcccatgataggagggcacaggcttgctgccctcggggaaggtcacagctgcggaggagctgaaggtcacccgagccaggtctccagggctgctcctcccagtgtgtcacatctggtgactcttccagccaccccagggaagggacacaaggtagtgtcaatacataagcaatagaatgagcagaagatggccaggcacggtggctcacgcctgtaatcccagcactttgggaggccgaggagaattagttgggcatggtggcacgtgccactagtcccagctacttgggaggctgaggtaggagaattgcttgaacctgggaggtggagccgagattgtgccactgcattccagcctggcaacagagcgagactccatctcaaaaaaaaaaaaaaaaaaaaaaaaaaaaagaatgagcagaagatatcaatggagaagcagaaaagagcagaaggagaggagaaattggggaacaaaagtgggcaacagaaggcctgggaggacagcacccccagggctctaagaagcggagtggctcatgttccatcttgcaggtttaagaactcctgaccttcaggattcataatgtccctcgccctgtgcggaccctattttaatgtccttttggcagcagactgttgttttgtcccatacgttcaggtctctgagccagtgtagaatccatcatggtttgatgtggcccgtctgggactgtgatattggcatagctttttttttttttttttgtgacgttcatgttttgtcgtgttgattcctttctccgaatcctatcattgtgttcttgcagctgtgtgacatgagtggcgcagttttggatacgtgtgagggggattttcagggtaagctggccccggcctcgcccctccaccccgctagctagccaggccagctgcccgctcctcccctccgctcctcgtctctgcatgtggctcagaccatttgcatggcagcttcactctccagccttccccggcctcagcaaggatgagttgatccatgagcttatttggctttggggcatccctggcctccttttctttcttttcattaggaggagctgggggagaacccagccagcccctttcccccaccttctctttcactggaatcacatctgcagctcctccccctccgccctccctcaggcttagaccgtggagctgtaacagatctgttcttcgtgtgagacttttgtgctggagacgcttgtgcccagcaccctgggggacatgcacctgctcacctttgtttaggaaggcgtcctgaggggaggtcataccaggtgcagcccagcacagggtccacaccacagcttggaccccattttctgtggccccgagtttgcaccagcagatctccccttccagacttagatcctaacgtctggcttcctccaggctgagactgctggcaaatcctaaagaatccatatcggagctcatcccgctccccttctccctcatcccaagtggatatggccagacagatcctttctatccaactcaataaaatttgggggagcatttatatcagtatctatttggtctcctcctcctataaagagtaaatcctcaaagcataactgagggaaaggcacgaaggaagccagaaggactttggtgtatttgcctcagtaagtaggggtggccaaagcaaaccaggtcttctccccgatttggcccatggtcctgcagagactaccgaggcgcaccaggatatctggtgctcacagacaggtctcctggcgggtgcttcccgagtgtcctggagacaagcagccactgtgtcccttttcccaggaatgctgatgagggcttctgcccctgaatcccattcccttgcatagtgactcctcccttgggggtgtctttaagggagcagcaaggataaaggtatgacagctcacacaagtgcttgttctgggcctgtctaaattcatcaccgccctgtattattcccatttgactgctgaggcacagggaaggtaggaaacttgtccaaggtcatgctcttcctgcctgacatatttgggatttttgaatctaagcaggggagcttggtgctcttacctgatagcgaaccctgcacagtgaggtgggccccgggccactcagcctcacacctgtgtagagacatgacccaagtagctggggaagggcagaggtgggtctgaggccacctgcttcagaggaacaagtggcactggctgttcctccagccccacgccccaaatctctgcttctccatcaggcagcaaaacaaagactggaaggacgtgagggctgcctgggggttggggcaagggaggacctttgttcaagagcttccatgtttgtatgatgtctttcaggacagtgtccaaatgtatgtctgtacacttagtatggtattccccagtctgaacatgtgttcccttcctctgcctcctggagtgctgctcccagccttgcaaagctaagtgacggccagaaactaagcaggcaggccgggcgtggttgctcacgcctgtaatcccaaaactttgggaggctgaagtgggtgaatcacctgaggtcatgagttcgagaccagcctggccaacatggtgaaacccaatctctactaaaaacaccaaaaaaaaaaaaaaaaaaaaaattagccgggcatggtggtgggtgcctgtaatcccagctactcgggaggctgaggcaggagaatcgcttgaacccaggaggcagaggttgcagtgagccgagattgtgccattgcactccagtctgtgtgacaagagcgaaactccaccccccccaaaaaaaaaaaaaaaaaaaaaaaactaagcaggcggaggaaggggacagcatgacgagagtaaaggacccaggggatctgtggttttctggctctctggctgtagcacatcctggaggagtcagcaagcacagcctcgtcagtgtcccccagggcggcggctgcagcagcaaggggattttttttaacgtggtgtggcaaagaggcttcgtgtccactcagctgccagtctaaggacttctgtcgtctttgccgactcagagacgtccagacactgagctgttatttcaagtacatttctcctgttcatcttgccgggaaaaatgaccttttaatgctcctaataaataaggatgtaaccagaggtgggggttgtcctgcagtcagggacagttggcaccaatgacaaccagggtcctgagggagaccttctactccacccatgtcagccatccaaaatgcagctgtttcttagagtgaggacactggctcagggttccccattctctcacaggcttgagaggagaaaggggtccactgtctcacgtcctgtccctgcagattctggggaatgaaatgcagtcgtctgatatagatccccaaaaaggtgtcattgagacctactcagcatccttcttatcaagaataaaggaccctgtggcttggcaggggagtgctgttctggccttcctctgaaccacagtggcgtatcctgggtgctttggttctacgaacttatggggtagaagcaaagcaggcatgagcacaacctgatcgactgtgcaacacaatgcttaaaccaacctccaaatgatctatccctagaatagcagcacccctgcctcctaaggctgacattatttgcctacaactaggttctcatttgccgggaagcctcctttcaaccacctctctctctgccgccttccagatcttgtccactttgatattccctcgatccacatagagctcgggtcgacgctccgcctgagtcccctggagcacatgcggcgacactcagtaactgacaagagggactcggaggaggagtctgagagcaccgccctctgacatgacaccgcccatcctgcctcgcgtgtacatacatcacgggccctaggaacgccgccaggagcagcgtccatgagcttgccaagtgttctctgctggctctttcctgccactgccaacacgaggttggaatttggcagaaaattgtgatctccagtccgtgtggtgatgctggtggtgcaggttttgtttgttcctttcgggtggtgacttcggccttttgtttgacctttgccttttgactttgtgcctcttttgatccactttcagcctccatgccagaaaacacccacctctccatccaaggctggtcaggaacgtcctttgcagggtcggggtggtgcgggagaggctcactttgcctggttagacccaagggctgctaccttttccttggacggctcatgtcaggtcttgcaggatcagtttaatggccacagaaaggaagcaggacagcagggcccctctcacccacaactggaccaggtccaggattctagcagtcctggggcactgacctttgccagctacctgggggagggcttgccactggaaaacctttcaggccgcccccatcagtgggctccaaagtaaatggctgaaaacaaaaatgtttcacttcctaacagttttcctttttccactgtgtgactgaaagctcctatatcattttatatttctgaatctataaaacaaaacaaacaagcctgacagtgtctggaggagccaaaggtggcctccctgtccccaaatatattggctatatgagagtaattttacccctctacgtacctaaaggcacccagttcactagtctgtggggtcctggagcctgtctcttctttctggaggttcaaactgaatagcaataattacgttacccaaagcatgtggaggaaaagtgaaaccagccacggagacgctggcccacgggctcggcctgcggtgtggcctgctttgctcaccagcgtcagccgctcatttccttctcatgaagtcccatctggtcatggggacgagggccgggagggcaccgggtagccttttcacacttggggattaggggagtgagaaaagatttgggccatgcatgcaaagtcaaagtttaaaattttatccttttcaaatagatgatataatatacctatacatgatataatatttgtatatatgaaatctctctatatttgtttaatttgagccattcaatctaaaccaatgtacaggtgtacaatgaaaaatttaaatgcttagttatttttcccaacacagtgtaaagtcaccctcctctgagagtgggatgtgcagagttttgatgttgcagctttgctcacttcctggcaagggcaggtcatgcctcaatttgtaatgggagtctggggtaagggtgggggttgaaagttgttatctttaaatacatgtacaaatcgttgtcaaaagtaacgttattaaaatagatttattatccctgagcttggcatctgttcttgctttaataaacctgcggggacatggccgtcaatctcaaatgcacaccgggatggagcctgaaggtcaccacctgtgtaaagccaggtccctggctgatctctcgcttgcttgtcttttgagtttttaaagctcttctttttacattctcctgggtagggaatatacacaataaatactagattcaacttacttacttacttacttactttacttacttacttccttggaaaatgctctccatttgtcgagcactaatccacgtctgtaaatcccgcaaggaggacaatggaaaccagccccgtgtgccatttctcaaaaccttcgagggcaaagtgatcctcactcctctcagtatggaagcaacaacacagcaaatctattgtctccacttttacccagaaccaccagaagacttgcatttccctgaccaatgacaccagcccagccaggctctcactgattgatttgattgattgattgattgattgatagagaaagcacgccctgctgtgagctggcacagctcgagttgtcaaaaagacttggcgaataagggtggctctctgaggacaggttccagaggtgctcactacgacgggagctgacttcttccaagccacccgggtaccaggcagctgccacactacagcacagagagccttctccaaggtggtgcacagcagaccctgctctgtagcagcagcaggaggaagcaaaagaactcacaattgcaaactcaatctttattgcagctgaaatactattttcgttaagtctcggacacttagacccactgatcctgttactctgcttgtctctggtgtgcagggaatcactttgctggattagaggaaaggtgccgccgtctgtttccaagacttctttaaaaactgccttgaaatgaaattagttcatctgcttgcttccgtgtggcagcctcctggcccgcggctgtgccaggcaccagtcctaagaggcatctatagactagtgcttatgtgggagcccaagcctcggcacagctccataccacctatcctgagctgcctcctgggggaccgtgctcttcagcttctaccagcaaggagggcagatacgggtgcgtgcgtggggcagaagacacacagccttctgagttcagggtctcccagatcttcactgggctctgaccttcttggcctgtggctcctctgtgtgggcccgcttctgctgaggctccccatcctccaggccgcctgccagctccctggacaggagggccgcccgcacctgccgcagctcccgcttctccctgcgctcctccatctcctcgatgtcgccagcaaacagggctttcagtgggggaatcagcttgggcattgttggaaagtctccaaagcagacctagaagacacaatagaagacaaggacatgtctcagaggggcaggggtgggggacaggagctggaagggatgcagtcatgtgctcacacagcagcgccaacgccccttccttggcacaagccaacaggccacagctgaaatggaaaaaagaatggcatggagggaaccctctaaaggggcagaggctccccaggcctggctaagggcctccggagagggaagggagagcagtccagatgctctcaaaatcaagctcctgaaaaacgaggcctggctccggctctgccccttcattccggaaggccaagggtcaggcctggctttcccactcacaagaggcaaccacctgtctcacaggtctgtgctgaggctcaaatgccatgactgtgtgagcagtccaggcctaaaaggattctcagaaatttccagtgaactgagactgaagactagttggcccctgcaggaggtgggtctcaccagcaaacccagggtggttcgacctggttagtgatgggtagataaccttttcccacggtggccccaaataagaaagcaaactccagctgaccgtcctactcagtgtgtagagtcctgtctccctgccccgtccccgccctgtgctgtccgtgtgacatacagaccttcatgtggtcaaaggcaactcccactttctcgctgaagttggggctgaagagggggaccttggcatagcgctggctgaagtggttcagcataatgaactccgcgttcatccgcatccccacgctgatggcttgggacgttgtgctgcaggtgaaggacagagcagactgaagctgaactcaactgcaagactgcaaagcagacagtggcacagaccctggccatcaactgccagggcacccggggaagctggtgggttttcttaacgggcacctccgtagccagcacaatctcccctgagggccagagccttcgcacacacccctggatgaagcccaccctctgtgctggctgccaaatctgtccatgagggcacccaagagaaaccacagggcccacctggggtaatgcactctttcgttgaaattagcagccaaaaattcagtcccccagcccccgccttcccctggcaattccctgacatggcttatagtttattcagccgatttctagatgctttcaaaaaactgtgcctcactctagaatcttgcttagaaaattctgcaaaaataaaggccaagagcctgtgagcactgccacaggtcaaggaagcccccatagcccttgataggaagcagggcagccccacatcagtggagacaaacgacggctgctcagtgtcacgtagtgggggagggagaggatgtgggcgacaaggactgaccggcctttgctacctgtgtgtcttttccactgcttcctcttccaaaccatcttccagggtggcttcatgtatcaggagggtggcatctttccctggagaagcagcacaaggatcagggcagagttctctgcgagagcggcacacaggcctcagtcacgtgctgtttcctggtctcaacactcagctcccctggccctgggtctgcctactaggatgacaaccagagactctgagggtggggacctgagtctcctgcctctgctgacgtttccctgcaagcccacctgcattcacctccagctacacaaaccccagagcaacctcagggtggcttgcttcttcctctactcacccatccggaccagagcctcgcagggcatggtgtccccggaatagaccactttccagccagaggtgtgcaccagcgcacagccaaacgcatgcttgcagtgccgcaccagacaggtctgaaactgaaagggtggggctggagggctctgcagctctgctccccacctcgcccccatgatgcctgcggctgtgccccttacctcttccaaatcacatgttcgcaacagcgaactgatcaatctttccactgcaggactggagatctcagccccttcctgaaggcatttggcaggaatcatactgtaaaaagacaaaacatttaaaatgataataaacgtttcttggacatctggaaccaaagtttaagtctttggctggagaaccccaaaatcattcttaggagaaaacatgagttaaatcatagtcactatgatgaggaaacagcagtcaaatataaagagccaaaccaaagcctctaggccactgggagaaacccagcaggtgaatgctgcctccggctcaggcagcacgggccacggatggctccagcagaggggactccttccccttggggtgaggatggtgccacctgccagctagccacacacctgctatggacattctctgtgctagccactatttgggtgcttggctctggaactgtctcatcaagaaaagctgctcgaagtttagaaagcagctcagaactcaaatgaggactgggaagaaatgcttctaagaaaataagcattacatgggaactatctaatggtttctgtccttcagccaatgcacttctcccctgcttctgccatctgggaccatgtcaagggcaaggctgctgggggatattggtaactaccccagtgtccaccttgagcttctgaaggagacggcagcaagcaacagcccagcgggccaggctgccctggatgctcacctgatgtggtgcaggacctcctggcactggttgtggtactgctggagccaggctttgagctggttgggggcaaccaccagcaaagggtgaagcggctttcccaaagatgcctggaacaaaaaatgcaagtgccgactcgacgacagaacatctcaataaaaactggagtgccaagaggcatggcggatgatgtgtaaaccgctgaaactcagaacgcccatcaagtgccacacttaccaaggcgcgttctctctgcagcaagatacttggcaagccctggcaaggaaacaggagacatgcgtcagccaggccccagggccatcccctccgggttagggtctgcagccctctctcttgcaggagttgccagcccgacgtcacccaccagcctctaacacagccgcagtgggggtggcacaggccgagccccctgcgccatggccctgaaatgtcacaggcagaaagcgacacgacccgtgctgggaagagggcaacggcccagggcccggcaccccaggagaccaaggtgagggtctcatagccacacctcctgcatccggtcaaagcttccgctgagcaggccgtgtgagattcaagactcaaggaaggctgggtaaactcaaacctgtcctgctgcaggaaaggaactgaacaggaagagaagacattcttgtggcgcagaaggactatgttgagttttgcaaaaaaccatttcctagccagagatgagtaacaaaagctctgggcaagtttggaagcggaggaaaagacgcagccaaagggccaactcaacgtggcagtgcctcctccaggctccagctttgtggtccagcccaacactcaccgtgtggtgatctgcgtgcaggtgggacacaaacacagcagccagggtgcccaggaccctgtccacctggtctccgtaatgacggcacagctgcccaaatgtgccctcaccacagtccagtagcagagacgtgtcggggctgcagaagagaagaggaagagagtcactgccactaggaagactgctgatggttcagaggctgatgtctgctttggacaggaccaagaagcaactgcagaaatttctgtctctcctgctttgctttgaggagctaatataaaagccaattaatttaaccataaaggtgattttacatgtgtcatcctctttatagcaaagaagtatccatggaaccctgaaaccctttcaagtagacttacacaaaggctgggcatcaaaaaaaaaaaaaaaaagtttataggaggcttaaagcatttagtcctaacaatgaatctgaccatgcagattgactgtggccacagcctctgttgaaaataccaggacaggcactgggccatatgagactctttctaggtccagctgccatcggacttttccccctttgcaagtggtcggggtttcctcagctcatgtcctcaaagacacctggtgcagggcgggctgcaggtgcttcattcagggagccagttaacgcagactcccaggtgtcactcggggtttctgacttggttttaggcagggctctggaagtctggattctgacaaacttcttgggctattctgctgtgcagtccatttcagaagctctgctccaaggcagagagagtgctgacccgctctggcctccttcattctctgggaggagccacgaacactgagagggctgcacccattttgcagagagaagccccggtgctaagacattaccttctgggggaaaaaggagtcgggaggcggaggcaaggtggcaatagcaccttcccattagcttcagctggttcaaaagctgctcgcagggtgtcaggtcaaactcaaaaagcccttcttcccccaggatctcagcccccgggagaggccggctcactccaagctgctttattgcatgtcctcatccacagagaaacacaccccagattgtatatttctgatgtcagggcacatctcgtcactgctgtatatatttaatgcactatttggttgtttatcatccaccactagcatgtaagatggcagagcaaaatttaaaacaaacctggtaattcacaatcttattttcttcacatactatctgtagagataacgtgtacatgtcacaacgcatttgactaatctctctgctgatgaccccaggcaaacccaagagaatcaactaaaaaacatgtcaaggggaatccaataaaggttctgaacacaaatgtgcaaaaccctaaagctttttaacatactaccaacaaatggctgggggacaataccatgtagcaatcaagaccccaagtccccgctcaaacttcagatgccccacttaccagctgtaggaaccatagcaagtcacctctctgaatatcaggtcactcatcaacaaaatgggtagttattcaccacttcataggattaatgtaaaaattaaaggagctaatttcttagctaggtgtactgcccacagtaaaatcagctgtttattaaaagacatcatgggatgaattttggtgattcccagggtaaagtttgctactgaggctataaaatgcagtaaggccacgctcctctcctggacactccagtcgacatgacaagtgacagggcttgataccgcatttcaaatcgactggtgagtacagcaggacttttgtttaaaaagtaaacgtgcccttgatggaaggatgcttcctgggaaagcagcataccttatgttgacaagtgtggcactgacatttcgaatcttcatcgggatggcagaccctgttccaaggaagatgatttctgggtactgacttcttttctctgtgaaaaaatccatgtgaaacaatccattcctttgggtcaaaagtgagccagcatgcagccatgagaaggtgcaatggtttgagtgtcattggtttgtccccagacctcatgtggaaacgtgctccctagtatggcggttttgggaggcggggcctagtggaaggcgtttgggctacagggacggaccctcctgagtggcttggagctgcagtagtaagtactggctctcaggagactgcattacttctcaagggaatggatttgttcccaggagaggggggttgttataaagccagagtgcagctcaggttatcccgtcttcacaagcgtccacttcctacttgcgctcctctgccacgttatgatgcagcatggaagccttcactggaagctagggccgtgaccttcaattctcagcccgcagaaccgtgaactaaatacacctcttttcttgataaattacccagtctcacatattcttttataataacaaaacacagactaagacagatgggtaagcaacatagttctatccagcttcccaggagggggactggcaggcccctggcaaccgctctgaaacaaaggacttcgcaccagtgtgggacccacaggctatctgtcaccaaaaggctaagaagaacaaataaattctccagtcctttcttcaaaagaattgctgtaattcttttacatttaaaaaatgacatttctttatgctgggaactgtcatttatttcaagagaacagtgtgtgccttgcatccagctctcactgcaagaccatgcacttcggtcgcatcctcccagccctaccaggtaggaaatgctctgcttcccaagggggaaacaggctcagacgcccaggtctccagtgaagatggtaagaggcagggtcaggattcaaatccagggagacccgatggttccaaagcctgtgcccggccctcagcctcagttgagtgacgtggccaagatcctccatggatttgcatccgcaaagccaggactagatctctgccagccaagtccctgctcagagctctttccacaggtgttcactaaaacgtttcactcagtgcgtgccttgccaagaatgcctgggtgccatcgccaaatgctctgattgggtgggatggggcacaggaattgggatttttttttttgagacggagtctcactctgtcgtccaggctggagcgcagtggcacgaccttggctcactgcaagctccgcctcccgggttctcgccattctcctgcctcagtctcccgagtagctgggactacaggcgcccgccgccacgcccagctaatttttgtatttttagtagagacggggtttcatcatgttagccaggatggtctcgatctcccgacctcgcgatccacctgcctcggcctcccgaagtgctgggattacaggtgtgagccaccgcgcccagccaggaattgggattcttaaactccccaaagccccctcctccaatgactataattctaatgtagagctgagtagagaagccctggattagactgaaaagccaggttagaatgcgccccaccagcactccacttaatgctaggaaaacagcagcaggggcagagcccaggaaagaaaggctgctctgtgggctcccactcacctgctggggctgggccgtcctgcgcactcctcctgtactcctgcacgctctgctggaagttgggaagctgcagcgcctcaactatgaattcctcaggattgcaagtaataatggcatccctgcaggaagagagagaagcatctcaggtgacggacagggtatatggcctcagcagaccccattggggatgtccagaataaattcagggggacaatctgcaggaagttccttcagatcaacactgaaggttaagtgactaggatctggggcaggtctgctccaccgccttttggatgctgcatcgctctgcctcagggccagtcaacggggaactactgatgctcagggcaagacagtttttttctgtggccagtgctgctgtcctggtgcagtacccctgacctctacccactagcagcaccactacccacctcctaggctgtgacaaccaagaacgtttccagatgttgccaaatgtcctctgaggggtcaatggtccgagctgagaagcaggggccctagaggagtgactctgaaactcatgttcacacccaggaaccttggcaaaacgcagaagccagttcggcagctctgcagtgaggcctgagatcccactttcctagcaagccccagatcacacggagtggcaactccttggacaggcggctcttcaacctcgctgagcattaaaatcatctgggagcttgtgagtcccaagcctaactctcaagattctaattcactaggtctagggcaggccctgtgcaatatttttcacaagcacaaggtaaatctgaatgtcggctagggctgtgtatcgctgctgtgtgttaagagcctgcgcagatgccaacaaagggacaccaggttcttcaaccccgtgatgttgcctgtgggcccgagtcttgctagtatagtctcttaaagggccccaactacccaacctcaacagcacacagcatccagtcataatccagcacatgctctattctaatacaaatactgtggagtgggcaggaaacttaaaatcaaggttcagatccttaaaaattaaaacaggccgggcacggctcacgcctgtaatcccaacactttgggaggctgaggtgggtggatcacctgaggtcaggagttcgagaccagcctgccaacatggtgaaacccgtctctgctaaaattacaaaaaattagccgggcgtggtagcaggcgcctgtaattccagctattcgggaggctggggcaggagaaatgcttgaacccgggaggcggaggttgcagtgagctgagatcacgccattgcactccagcctgggcaacaagagtgaaactccgtctcaaaaaaataaataaataaataaaataaataaattaattaattaaaataaagatgtggggcagtaaggctgttcactttcctggttggattgtactggaagaggctttcaagatggcatcttacatttatcaagtaccttaacaagtctcacactctgggccagtaatcccacatttaggaatgacttgaagggaacagagttcccatcaaagatttatatataagacatttattgtttcattcattaaaaacaacaaaaaattggaaacatcccaaatgagtaaacatccctatttggaataccaataaaaatcttgttacttaagactgtttagtgatacaggaaaagactgacaatataaacccacatacacaaatcaagaaacacaaaatgttatcaatcattatctctgggcaacaggattatgggtgactttgttcatcacacatttcctattttctatactgtgaaacacacgagctctatcactgctattcccatgcaaggcaattttggaaaaggagaactactggccccaatccgcccacctcaacccagcctggagtaggctgcttttctaaataaattcacgctggcacacagccaagcccattcattagcttattgtccgtgtttcttttgtgctcaaagcggagttgaatagttacaacagagaccatatggtctggagagcctcctggaacatttactatgtggctatttacagaaatgtttcccaactcgactgagacgattccattagttcaagatggcacagacctctgccactccctcctgggacggagctggtacttgaggaggcattcaccctgaaccatgggcacactgagggtggggccctccttctgaaagagacaaaacacattcatggagagaaagagaggggacgagagctgggccgacaaggggccggtctgagacactaccttacagcggaaactggtgagcagggggaagatgtccgggtggatgaggttgagctgggtttgaatcttgtggctgcgaaggttgtgaactgaggcacagttctcattcaggaccaagtgctgggtgtcaggcccaaacctgtgaagaaacagacccggcatttgcagcgtctgttaggaggcagctccccctgaggagtggtgctgagctcaggagtggtaatgaggatgaggtgttcaaacagttcagtgacttgccccaagcagtgttactacatggccaaacatggtcccactcctgctgtctcaaagcccggtgttccctagctcagctgcctttcaggtgtgctgggaagagtgagaggaaaaacaagaaaaagaagatgtccagggcatacaaataggggacccaaaccctgaggaatgaaagagacagcaggagagcaggccatggagtgaggggcaggtaaacgggccatgtggggagatacgggcaggggccaaaaagcagcccaaggtcaccccgcacccgagctcaactcatactcctccacctggccctggccagcgatgccccgaggaaaaagatgccttccagtgactaaacatctacctcccagggctgctggcgacgaccctagaggaaatgaagtgaaatgaagggtatttcacacactgcctcccacaaagtgggcattcagtaaatggaagctatcattttatagctgcaatctcttctttggaattcacttatggaatcctcaaccaaacggcagtatttgttcagacaccctgaagagtgtggagggtgtaaaataaatggaatcgtgtggacactgcgccacctagcggtgcattttcttcacgagtgtagcacagatctgggaagcctagaattctgggaaggcaggaatcccacagaaagtttaggcaggtgcagaagggtaggtagcgctggaaagagcacgaggggaggaaaggggaatccaccactgcccagaagagttaccccaagtgccgctgggctgggctccatacctctccatccactgctggtacctgctgtccacaagcacagatgctggggccatgtgaaccaccaaggccacgggggcatctgcctttccttggtacctgggcagaagagtggggctttacaaagtgatgcagactcaggacacaccaagacagggaccacgcagccagggaggggtatcgtgcggccctctgcagcactgcagtgagctgacagcctccacgcccaggccatgctctcacagcaggctgctcacggcagaccccggtgctgggccatttccaatggacgtgggattcctgtatctggcaagctctgctctgggctttccagtaggcctggctgatcctttctcagcactgcacttccttcctaccctctccactcatacgggtccaacctgcaaagccagacccaggctctccctgcctcctcctgctccctctctccttcctctctcacagtcaaatttcctcgaataaacctcctgcacctccaatgccaccctggtgtctgccttccagaggacctgagacacaggcacgagaaatgaaaatcatctgaaatttcaccacctggacaacagaccacttactaacatgctgatgtgtttccctccagttccctttaaaaagaaatatacacagtagctatttttatctatcccagcatcatcacacatccacacatggctctcaaatgacacctgattcattgaagaggttttgctgcccaaaactggattaaaatacaaagccggggctaccagcgcatccaaattcacccacagagaataaagcagaccatgaaacaactcctaacgctctgactcggaaggggtacagcagcccaaaaggatttgttgtggtaagtagaaaaaaacaagtgaaaaaatacagatagatacaaactaggaacaggaaaaatacaggtaaaccattaagagtgggggaaaagattcaaactcagataggtgggtcaaagatgattccatctggaatgaaagctgaaccgcaaaactggttaacttcgatagaggacaacaacagagtggcagttagcccaaaagacattccccagctgtgagtccatcccataacacggactcttgaccacgacagtctcacacactctgacccacctcatttgtttcaatgcaggtaatggaagaaaattaattcagttcaaaataatccaaatgataatctggggcattagttagaattcaaaaaagttctagaatttcttctggtataagagctgtaagagttctagttgaatttctagtcctcagttgtttctagttttcaatcttttctaatttcactttgaggctgtgtacaccggagcccaccaactaccaacagtgacttaaggcaggagtgccggcctctgaactgtaaacccagatagtggtcttcccagaaacacagctcttgccacaagatgcccatgtcgatgctgggctgggtttcagctctcacttctcccaccctagagacccctcattacctctgaaaggtggcattctcacagatgggttgaatgaagctttcatctggacattctaccaccacaaaagcagcaccaggatctggaggagtacacagctcttcagccaaaatctgcaaaaccaaataagcccgcccactgggggtcacagctcagccaccaaactgaactgccttcaaggcaactgctaacatgacatatcctatccagtgagctgagaggtaaacaaagcacaaaaccaactttacacatcaccatcaacacccttctggtctctttgtggatacctaaacaggtaactgtcaggttgaggcacttcaggcctacactggccaggaaaggaggcttggcattaaggttttcttcagtctgtggccactggtcctaatgtcctcagaagtcagaggaaatatcttgacatagaatactgtggcattcctctggaccataaaccccaggcccatccatatggggtctgttgttagacactgtcctgagctcaagtaccaaggaaagcatgcaccctttaaggaggacggtgactagatcctaaatggacaatctacaaaaatgctcgaatgcagccgtgttgacatgcgggacaaacacagataaaagaggccattttatcacttagctgagtgatgtccaaactgttccacgtccttcaaaagtggtgtctgtagggcctgaagaagacagactctgcccagcatttcagaccctacctgtaactgctgaatcaagaaaaccaggcatctcacctctcttccttcatgagtgatgcttttcccgtccttgacagcagcaatgatgggagcgatggcagctgtcccactgaaatgaagaggcaaggcctctgtgaaatgtgatttccttaagtggacaggtgtacccagtgagtccccagaagccttaccccccacactcacactgggaggcccatctcctttgctttgagcaccaagaagtttcctctctttaagtgaagctgcaacaaagagaacatagatgtgatcttaggggctaatgaagaaggttggttttaatcaattttcttagaagtgtatttttctagattaaaaaaaaataataatgttggccaggcacggtggctcacgcctgtaattccagtactttcggaggctgaggcgggcagatcacctgaggtcaggagtttgagaccagcctgaccaacgtggagaaaccccgtctctactaaaaatacaaaattggccaggcgtggtggcacgtgcctgtaatcccagcaactcaggaagctgaggcaggagaatcgcttgaacccagaggcggatgttgcagtgagccgagatcgcgccattgcactccagcctaggcaacaaaagcgaaagtctgtctcaaaaaaaaaaataaaaaataaaatgatgttgtttccttacaattcattaaaatgcgtttattgctttcagaaggtataccatattctgaagaagtcatttattgtcaaatgctttagtactaaaagccaaaatgacttaaatcagtgttttatttcccagcattaactcattataaatttaataaaatgtaattcaatatgaaagttaataaatatccttcaagtatcattgaggagaaacactgttctgtcattctacattcctcaattaatagctaaaggaatgtcaccagagcgttgcctaacagagcaaccagcaagcaaactgccatgtaacataatatttcaatgacagtgataggctaacaaaagcatggatgatttttatttctcttgtatttttcaattatgtggcaatataatgtcactgcttttatcttggagataaattataataaaaaatctctaatagccaggcacagcggctcatgcctgtaatcccagcactttgggaagccgaggcgggtagatcatgaggtcaggagatcaagaccaccctggctaagacggtgaatccctgtcactactaaaaatacaaaaaattagccgggtgtggtgacgtgcgcctgtagtcccagctactcgggaggctgaggcaggaacccaggaggcggaagattgcagtgacccgagatcgtgccactgcactccagcctgggcgacagagtgagactctgtctcaaaaaaagaaaaagaaaaaaaaaaaaaccctaatatgctattacattagaaaggcaaacaataattctaccagaaaacttcacaatcattttataggaaaaaaaaaatttcacacaaacagaaaaatgtcagaaatgacatgtaggcctttgagtgctaaatgacatttgatttccattttctcctttaaatcttcatcaactgtgcatcttcttttaactctctgaagttaaagagttactcgtagggctgagtctcaaatttggatctgaaatccttattctcagggttgtagaattttccatcttaaaaaatatcatcctagatgaaggattacagcttcagtgtgcacatcacacagtgatgattgatggctgacatctttagataactaacaaccatgtcacgacccaacattctctccacacacccaaacgggtttgaggatggcaactaaatgtctctaatgtttaaaaggtacttgctgttgggggcagtggctcacgcctgtaatcccagcactttgggaggctgaagcaggaggatcatttgaggtcagaaattcaagaccagcctggccaacatggtgaaaccccgtctctactaaaaacacaaaaattagccaagtgtggtggcgggcacctgaagtcccagctactcgggaagctgatgcatgagaatcacttgagcctgggaggaggaggttgcagtgagctaagattgcgccaccgcactccagcctgggcaacacagaaagactccgtctcaaaaataaataaataaataaaataaataaaaggtaattgaaggctgggcatggtggttcactcctgtaaccccagcactttaggaggctgaggaaggcagatcacttgaggtcaggagttcgagactagcctggccaacatggcgaaaccctgtgtctactaacaatacaaaaattagccgggcatggtggcaggcacctgtgatcccagctacacgggaggctgaggcaaggaatcacttgaacctggaaggcagaggttgcagtaagtcgagatggcaacactgcactccagcctgggcaacagagcgagactccatctcagaaaaacaaaacaaacaaagaaacataaaggctggtcatgatggctcacgcctgtaatcccagcactttgggaggccaaggcaggcggatcaggaaatcaagagatccagaccatcctggccaacatggtgaaaccccgtctctactaaaaaaatacaaaaattagctgggcatggtggtgcgctcctgtagtcccagctactcgggaggctgaggcaggagaactgcttgaccctgggaggcagaggttgcagtgagccaagatcgcaccactgcactccagcctggtgacagagcgagactctgtctcaaaaaaagaaaaaaaaaggtacttgccgacttaaggcagggaaacccatctccctgggagctgaactcaacccatggagatatgttcctctctgaggaatgcagagtatctggaagactgatgagagccagaacgcagccaataacgccccaacagtgcaccagctgcccaaagccgaggtcttccaacagatgagtttttcaggtcctcatgccaagagactcctggaacttgacctagctcagctttattgctttccaaaacctcacctgagagcagcaaattaattagaagaggggaaaggcgttataggctaatccagtgacagcagccctcagaaggagccgcagaagacagcaaggaaggagatggaaaagccagggcaggcagctggcagcccccaggaacggctgcctgataatagggcaactgcccgagtgtgtaaaagtgagcttgtcacttttcatcatgctcactgttacctattccggaaagcaggaatacgatttaaagattaccatagaaaacagtttaaaaatcagacaatataaatatagattatcaaaaataaaatatttttaaaactttaaaaaatgattttgctatctaaaactcagaaacatacaagtaataagcctgttaacagtagtacttaacttttatgaaaatcacattattcaaataaatcgatagaaatgatactggcaatgatcttgccactaatattaactacttactttcattattattttcacttgtagcttttagaatttagataacaattccaaatatatttcaaaatcaacattaaaaaataatctaagcccacaaaaaggcaatgaaatcttttcacatatttagacaaatttgttgcaaattgtattgataaaattttaatgcaaaattctattaaaaataagccactagtcagatcttacaaacagcttattgtaacaaaaatttttaatggaatttgaccaatttcagagttacagatctaggcctttgtgaatgctagctaatattccaattaatctggtgttagaccttagctattgcaggggaatgaaataaagtaaaacagagttaaaagactttgaataaaggcctgatggagttgaaggaaaacaaacacagctgccttcaataatttctgaattctaaaaggaccaatcattggcaaatataaaagaatatggaccaggcacagtgcttcacgcctgtaatcccagcattttgggaggccaaggtgggtggatcacctgaggtcaggagtgaaaccagcctggccaacatggtgaaaccccatctctactaaaaatacaaaaattaactgggtgtggtggcgcgcacctataatcctagctacttgggaggctgaggcaggagaatcacttgaacctgggaggtggaggctgcagtgagccgagattgtgccactgcacactccagcctaggcgatggagacagacatggtctcaaaaaaaaaaaaaaaaaatgtacggaggctgacagggcactggaaaaaaatttaaaaggaaataaaagtatggggttattttgagaaacagagcatctaaactctgaaacctacaagtgatgacaattatgaaaggtcagtagtaatacttgttgcaggctcattgccagtgtcatttctatcgaattttttttttctttgagagagtcttgctctgtcacccaggctggagtgcaatggtgcaatctcaactcactgcaacctccgcctcctgtgttcaagcgattctcttgccttggcctctcaagtagctgggattacaggcatgcgccaccacacccagctaatttttgtatttttagtacagacagggtttcaccacgttggtcaggctgttctcaaactcctgacctcgtgatccacctgccttggactcccaaagtgctgggattacaggcgtgagccactgcacccggccttccatcagcttttctgaagatctgctatctcttcttgtctcaggtaacaggagtgcctaccctcaaattaatgaaaaagtgcaaaccagaggtcgctgaccaagaccccagtcatgtacagccctccggaaagtcttccttaccttacagatgaaagctacgaccagggaagagtccctgacccctcttctctggctaacacctgaggaaaaacacacttgattatcacaaggtaaatgtgaaagctgtgaagacatcacagactgattatgacccgatacctaatttcacttcacataaaaattaatggacgctactgtcccaatacaaaggctgaagacactaatatactcaagaagactttttttccctacttatgtggagatgtgtttgcgtaaatgaaaaacacaaaactctcaccagaaaaactttagaatggcaagtgaaattttttttaaatgacacatttcacctaggactggagaagacagagaaaaatatattgtaatgtgctttataacacatataatatatgaaataacacaaaagttcaaaggcctgcagagaaaatgctggtgtcagtctttacccggtgccatccaaacaaggacagcacataggggtcagcctgttctcagtcactagacaagacctcaggacagaaagaggagctgccgagctttgccaacgctgaccttctgttaaggacaacaaactcccgaagcggcctgactcctgagctacatctcatcttggacttttaactccgtttcccagtgggctgtcattctggaagacgtgcagagcctctcactgatttgactgtctcattggcttagcagttatagtttccacattaatggaaaatttgcataaatgttacattaatgaaaaatacaaaatgaatccgtttgtcaggccctgttctcctctgggaaaacagaacacagttttgggcctacccagaccctgggtggccaaaactgtggactggtcattattaaagttgcaggctgccacctttacaacaacccttctcattcccccaacgggccaagttatagtaagcccaggaagaaggatctgtttacacacctggctttcttacaataatgactctctacaagcattacaaggcagagaattaagaaaacgcaagcctttctgctgctctgttttgtttatactattaccatgtggaaggtgtggctcattttcattcgactcggagtctgaagatcgctctggactgagcctgctgagaggcctttctggactctgccatggttggtgctttcccctcctctgttcacctggtcagtacagataccaccaaattacacactgcacaaggtgagctgacagccaaggcccagacgttcatacatgggaatgccagaacgccaattaaatcagcacaccttttactatacagtaggaaataactagttagttaacttcctacctggtttctgggctgcacctatgtcctattaatgtttatgtttctgcttagctcacagcctcggccacagtaccaactcaacaacgtgttatctaaacagcatgtgggttgtagacatgcttatttattatcatcactcccgctaaaacacatagacccaaagggtacctatctcaagaaggagcctcattttacatttagttaaggctcaagatcaagggaaaaaaattcgctgctctaagaagctaaagcacagctgcaacgagaatgaacgtaagttcactcactgagggccgctggacactgaaaaaacagtgatcggcaaaactgagcatgttaacatcgatcacgcaaatcacatatgaaagttaactgtcacatgccatggagcgaagaacagggtgctggaaatggacaacaaacaggtggatgcaactcaggctgggggtggctacagcaggggtcaggtgagagaaggcatctgagcaggaggagcaagccaggcaatgggagtgctgatcagctcatcacagcactggcctaggagcacttgtgccattgctccggcacattcctctcctccctgctgccttctgccttcagtcagtgtaagcctcatctcctcgccaggttctggacttctctggcctttgctgggtgctctggtctgtcacccatcagcactacttagtaagcatcacattagttagtactaacaaggaaatacccctactgcttggtactctcttcacatgtaagtaaaaccagacatgaatgtctttagccaagttcaaggacaagactaactcttttcctaagctaagaccacatcatctggccctgatacttcggaatttgcaggagcttctaacccccaacaacacttcttttaggttgctgtaatcattatttatttaaaaaaatctatctgtgcaaacctcttcatgatcgtctgatcaaaagagggtattacgcctgtgggaaaaaacctccaagcaatgaatgtgcaaacttgaatgcaatctatttaccaacagtgcttgattatctaatattccaaagcataatcactatcattaggcataagtcagacatccgtaagtttataagccagggcaggagccatatcttcattcctcaactaaattttctaatcatgctcagaacacaaaacagggtgcccacagcaagtgttcagtttctattttcatccatgttttctttactcaggacgtacaccctcctcctgggaaacctggctttcatactcactgtgtatggggatctggtaaactgtcatggtttcatcctcgtattctggggcagagtggggccgcacagctacaagaaaaccacacaacagcaaagtgattgcattagtgaagatgtgtgggaagagtaacttcaggatcaccaaccacgagcaactgaattgcctcagaattatggtgggaatctgacacgaaaaccagactttctaaggagattaccatttttaggaaataaataaaagtgtattttggtcagccatttatatttactacagccagatgaaaagacattataatctttggtgactatccgttaaaaattgaaaaacaagaaactagtactcaactttcagagacccaagttaacaaacagaatagtgaagccagggaacctatcatcgcaaaccagaagagctgatgtatattttgaaacaaagtattagtgtttctataaaagaggagtattaacaagccacagatacacaccagtgccaggacaagagccctactagcatcctcagtgaggcctcttcccatcaagaggctgtaagcccccctgcgcagctggagctgcgtttcaatgtacaaagttggccacaaaacctctagggaacccttgtcacccccgcccccaactcaaagcaactcaacgacgagaagcacctctggaactgaggcaggagccctgccgtctggatggagaatgccacacagcatgtacacaggcaggcatcagctgttcaatcactcctgccgacctggcccctatttttacagcatgaggtgggaacacagaaaatgtcactatttagaaatcccatctccagccacatggtagctcattttgggaggctgaggcgggcagatcacaaggtcaagagatcgagactatcctggccaacatggtgaaaccccgtctctactaaaaatacaaaaaattagctgagcgtgatggcatgcgcctgtagtcctagctactcaggaggctgaggtgggagaatggcttgaacccaggaggtggaggttgcagtgagccgagatcatgccactgcactccagcctggtaagaaagcaagactctatccaaaaaaaaaaaaaaaaaaaaaaatctcgtggtgatgaagcatttgattttgaggtttgatgttgatgtttttaatggattctaatttgagaggtcagggcatatataagttagaaatagcagaggatgagtcacagacaaagacgtacccagttctattcctttcaatggaccagaaaatattttgattgcttcgaggtatttttcctaatgaaaaacaaagaaatgagcagttatggttgaacaaatgtagaacacagcaactattcaagtatttaaaaggttaccaataggtatcaacataaaacaaagcttagtaaatattttgaacatcatttattacaaatatttactgagtatccattatatcagatgccaaggatatagcaggaaaaagagatggaggccttgctctaatcaggccagtggaggagacaaaaggaaacacgataacagaaacagcttagtggcattatgctaagtgctctgcaaggaaaatgaaaaatacagaaggctgggatccaacttgtctagagaagaagaggcagttctggagtaaatgaccctctagctgagccctgaaggttcagtaacaatataggcagcaattagaagaggcagagggaacccgcggaagggcgaaagtcctgaagtggccagggagttagagggacataagagtcagcccatgcagctgcagttcagcgatgggtacagatggaagtgtgggtagcggccggggcctacaggacttgtaggccatatcaaggtgttttgattgtattgcaatggggagcccatgaagggctttagggtggcaagtgacacactacttttctgtcttgaagtgacctctctggctgctgtgtggcagatggattacaggaaggcgagaatgaatatgggaggctattgtagtttacaggcatagaaaacagaaataaggaaggcctcaataagagacaaatggatggatttcaaacgttattttggggaaagacttaacaggtcttggtgactttcttcttaaggactggaaaatgaactgttatattcaacaacacacacacgccttctcaagagtgtaataagctggactgaaaggtaagaagatgtcagaaatttattgaataaaaacaaaagctgccctttcttgtgtgcctacttggtgccaaacatatatctaataaagtgatttagtgctttatatgtgctgctacgtcatttaatctttaacaactctatgaaacgtgatagtcatcttatagatgaataaactaaagctcagaaaggtaaagtaacttgatcaaggtcacatagttaatcagaactcaagtctttttaacttgaaaggggaagcgtttcaacgaccaggtatctctggagggcagaagactgatttgcaaaaaggaaaattcttgttactgatattacaaaaggaaagattgcttttgaaagatgtgtcaggaaagactcaccagttgtggaggtccagaaagtacacactttggaagcccggtttcctttaaagtaagaatcattcctaaaaaggatgcataaaatcagatctctcatcaatttgacctgtcgtcactaacaggaggagcaccccgtactaatccaactatttatctacatctccaccttccagctttggaagtacaaccagggaagatgtacagagcagaagtgatgccagctagaggtgtaacagacaccaaatattctttaaatgcctctagaatgggctgagctgtcactagggtgaagcagcaaggcacccagtgtgcaaaatgtaaggaatcatgcaagtgaagggctggcaccctaagtgcctcaccctagtctcagccctgagaagggagactggtctaacacttcactccttccggtccatgccaccaagcccacacaatttggctgcaacacaatcctgaccttccggttgatagacataaatgacagggtaatctggacagtgggtatgtgtgtggctgccaatgtgccaatggcgtctgcggtaaacatattaactgtaatcaccactgctagactctccagtttactgccacaaatctctgtccccgcaacgcaagaaactaagtggatggtaacacttaagaggtggtatccatattaaaatctgttctcctgagtcacagcttttaatgctctgtgctgctgctgactgggctggtataaaaagaattccaggccaggtgcggtggctcatgcctgtaatcccagcactctgggaggccgagacaggaggatcgcagaagtttgagaccagcctgggcaacatagcaaaaccccgtcgctacaaaacatacaaaaaaaattagccaggtgtgatggggcacacgtgtggtcccagctatttgggaggctgaggtgaggggatcacctgagcccagaaggcaaaggttgcagtgagccaagatcacgccactgacaaaaaaaaaaaaaaaaaaaaaagtagctgcccaccccagacttggaaaaatggtaaagccggttaaaatcccagagacttcccaccagcctctgacactgcaaagaatatactcaccacttaagcccccaacattagaccagtgcattcgtgtcaggaatatgttgtccaggcgagcaacctttaacctaagaatgaaaaaacatttaaacaggataacatgaacagaacaaggaccacttttgctataaaaaacaactggcctctcatttcggctttcaagccccgtaatcaactccccctccgaaagcaagagactgactcacttgtgctcctgcatgagtctctgaacgccttctccacagttgaagagatacctacaagacaaacattacacaagacattcagaaggttttattctgtaaactctctgacaccaattagatgttttattgtagactctggaaaaaaaaaaaagaaaaaaaaattaaaagtccacgttggactaccgagccacatttatgctggtgggttttgagccctccttagcagaggtggagaggagtgggggcctgtgtgtgtgggtgctaggacaaaatgagtcctttctccaccaccggctacacaccagatctgtccaccccacacgctaacaacgacacactggccttggggtgcacggaagagggtggagctccgaaagtgctgacagccaggccggggcccaagggttgggaaaaggacgctcagacccaggcctgaagttcttcacagatccgcagaaatcacatggatgcaaagaatctcggatttcccacccaccataactccacgaacccccgcaacagtgaaccacatgtgtgaagcagggaagccgaagccctgggaggtgccccgatgctcagaggctgcgccgcactgagggcccagcgggacggggcgtggctcgttgactgaccggttgaactcggagaagacgtagagcgcggcgcccgagtcccggctacccgctgccaccacctgcaggtacacggtgtttgggccgccggagcaccccgacggtccgcgcttctctcgcgtgcgcaggtgccgcagcgggtccttgcgcggccgctcgcggcgggcgggtgcctgcgatatggtgcgtccctgcgacatggtgcgtccggccgcggaccgcagcagcgagcaaagcgcccacatgcgcccgtctccaccaaaactgagaaagccgccggtcacctacgcccgcgtttcccgtgcaccacctagccgctccgcatggcggatccagccaatcagcgcgccgtgcaccgagcttcccgcctacgcgaggctgctcatccaatagaaaggagctttaccgctcgggacttgtcaattgacagtggccatagagtagaggaatactagagcgtctcaagcggccccgcccctagttctgttccggtttgccggccgcaattttttccggaagctgtttttctcctggggcgggacttccggaagcacagtgccaggaaaagccttcctggggaaggcgggacctaggagtttggagtttcgctaaaacgctcctgttctcaccagataagagctgtgtcctccgggcacgtcagtccctcagagcttgagttagaggtggttgtagtggttgtgaggattaaatgtgaggaaatcaattgtattgagcattagcataagcgctttgctaattttatttccattgtaattcgtatgcatacatgttagaacttgatcatttttacgtggtgtcccgagcttgtagtcccagctacttgggaggctgaggcaggagaatcgcttaagcgcggaggcggaggttgcggtgagtcgaaatcgcgccactgcactccagcctgggtgacacctcgagaccctgtctcaaaacaaaacaaaacaaaacaaaaattgtagtgttttttggaaagaaaagcaagaatagaggacaagctctaaagcaagagtcttggctcatttgttagctgcgtgatcttgacctctcagagcctcagctttcttatgtgtaaaatgtaataacagcaataacagtatctcctacttcagaatatagaattcagtcacctgataatatatcaatagacctttgagtggcactgtcacagaagaggcacccagtaaatgatagaaaattaatacaaaatgtttcaactcctagacaatatagctgaccagggacatcacagaggtagatgtcccaataccagctttttgaaaaaaacacccagtcccctcttatgtagctaatgaggatttctcactgaaagggatatcagttaaagccgctagaaatacagggagctcccttaaaagaggaagataatttacctggaagctccactcaaatatgattttttaaagataatttacctggaagctccactgacatatgatttttttaaataaatactgaaagatgtcacttttattcaggaagtaagggagattcaagtcatgtagattcctactcgaaaatcttgacacctgactttccaggatcacattttcatatggagaccagtttcctcttggtttcttcagttaagtcaaaactacacgttcctctttccccatatatttttgctcattagtgtatttcttgagctgttttcattcaaatatgaaattttttatggaagattatcacccacggtgtgaaaacgttttgtacttgaaataaccatcccagtgagggtcaggaaaacacttcagatctactttacacagttagagggcgttacaaactgaaaagattatcataccaccatctccataagtatttgaaataaaaatgatagtttttaaaagttgcttaaagcctgggcaccgtggcacatatctgtaatcccagcactttgggaggccaaggcgggagaatagcttcaggctagtagttcaaaacctgctctgtggccaggcatggtggcttatgcctgtaatcccagcactttgggaggccgaggcaggtggatcacctgaggtcaggagttcgagaccagcctggccaacatgatgaaaccccgtctctactaaaaacacaaaaattagccgggagtggttgcatgggcctgtaatcccagctactggggaggttgaggcaggagaatcacttgaaccccagagacagaggttgcagtgagccaagatcacaccattgcactccagcctgggtgacagagggagattccatctcaaaaacaaacaaacaaaccagctctggcaacaaagcgagacctcatctctaccaaaaaatactaaaaaatttaaaaataagtaaaaattagctggacatggtggcacacacctgttgtcccagctactctgaaggctgagacaggaggatcacatgaacccaggggtttgaggctgcagtgagctatgatcataccactttactccagcctggctgacagagtgagacactctctacaaaaaaaaaaaaaaaaaaaaaagaaaaagaaaattaattcattaaaactacttttaaaaagtgtagtgcaataaataaaatactgatttttttcctgtgatgactgctttgatccttttaaaaaatatatcaaatttcacaaacaaaaatacattggttcctctattttattggtgccctatgtgcatatctatctgttgggtaatctcaaactacttatctcaaaattataggaggaatcacttttggtcatcgacttatataaaattctgagggctggatgctatttaggttgtttctagggcccagtgtactttctgcacttatgctttgggtcatatttttattcctggtatatgaagacaatagctagtacttcttcaatctgaggttatactggaatgtaaatttcatgagcctgggatttgtctatctggtcctctgctgtatcattagctcctaggacagagtctggcttgtggcagacaataaatactaggaaattagaagcaagccagtagcttaaatgaggttttcagtttacaactaagcagggcctaaaattgaatcaagacaacaatgtatgtgttttctgaaggggattggtgtgactggtacctccaaaaggatagttcagagagtctgaaacagaaaagtgtctctggacttgctggagtagaggcagcctgaccatcgggacagcagagaaagtggaaatcgaggcgacagactttcagaagtcagtgatattaacaattaatataatacagccacttcctcttgctttgagtctctttttgttatccattttgtatatgggcagcttgtggcttgaaatcactttcagtccttttgttggtcacggttgtgtttagtaagaatagcctgtctctgctccttgcagtggctgctgggtggctcaatgggagtggaacctcacactcacaggtgtgggtcctgggtactggccctgctgggggtgctttggttcatttcccattgcctctccatccatgtagactgtccacattcagtagttaggctgagcttctctgaatggtggtcagcctccaaaaggatgaaatgaaattgcaatgcttctgaagaattaggcccagaagtcaacgcaagacacagacagcacccacctagattcaaagggaggaaaattatattctacctcttgaggggagaagtatcaaagtcacattgcaaaagagcccttgacgtggaaaagtccaggctttcttggaaccctctgattatcctacgggggggtcctatgaagagatggctgccaggcagaataatctggccaatgaatgctgggagcagtacattttcatatgcctgtagttacaaaggtataatttataacttgactttcttctgtacacgcttgtaagtatggttgccataagctagtccactcatatgtggccatctcttgggtatatttataaatcagacttttgtacctacaaagctggggcagttcctgcgatccccaagatctggtgatctgaccaagggacacatactttgggaccctgtctgaaataccctctggctttctccacacagacattcattcattgattcattcagtacactcacacacacacacacacgagtttctagacactcttctagggttctagatgctgtactaagaccttggtgtacagaaagatgaacaaggtcttgctctcagaaagctcagaaagttggtgtcttgggcacagggatggggccccagggcacacaggaaaacattataatagatgcttttgtcttcattgggtctgaggtgtttctggtttagagccctagaaacccaacaactccaaacttgatggccacaatgcatcagagggataattggtttttgaaacaaaagttactttgggctgggcacgatggctcacaactgtaatcccagcactttgggaggcccaggcgggtggatgacttgaggtcaggagtttgagaccagcctggccaacatggcgaaaccccgtctccactaaaaatacaaaaattagctaggcgtggtggtgggcacccgtaaccccagctgctcaggaggctaaggcaggagaatcacttgaacccgggaggcggaggttgcagtgagccaagatcgtgccattgcactccagcctgggcaacagagcgagactcagtctcaaaaaaaaaaaaaaagtctgcagtcacgtacagcaatgtcctagaccttcacattcactcactgatgcaccccaggcaacttacaatcctgcaagttccattcatggtaagtgccttattcaggtgctaatttctttctttctctctttctttctttctttctttctttctttctttctttctttctttctttctttctttctttctttctgtctctctctctctctctctctctctctctctctctttctttctttcttttttgagatggagtttcactcttgttgcccaggctggagtgcaatggcacgatctcggctcaccacaacctccacctcctgggttcaagcaattcacctgcctcagcctcccgagtagctgggattacaggcatgcaccatcacacccggctgttttttttgtatttttagtagagatggggtttctccgtgttggtcaggctagccttgaactcccgacctcaagagatccacccacctcagcctcccaaagtgctgggatcacaggtgtgagccacagcgcccaggtcaggtgctgattttttataccacattttcactgtgtcttttccatgtttagatagatttagacacaaatacttgccattgtgttgcaattgcctgcagtatttagtacagtcacatgcagcctggtttgtagcctaggcgcagtaggttgtaccatacagcacaggtgtgcagtaggctgtaccatgtaggtttgtgtttgtgccctctgtgatgtttgcgcaatgacaaatttccctaacaaggcatttcccagaacgtatccttgccattaaatgatgcataactgtacaccgggaaccagaaagaaagaagaaaggaaagtagctcagcctggctcaggcttggagcggttgcagctctgccataattaatgccacccaagctttattacctttagatcctcagggccaagcacggtgcccgggaattcgtggagctcagcgagtctgtgctgagggcatggagcatctgcccagcccgagtcgccccaggttgccatcccaaaataccacagactgagtggcttccccaagacttcaattttctcagttctggaggttgaaagtctaagatcaaagtgtgggcagggctggtctctcctgaggcctctctccttggcttgcaaatggccttcctcttgcggtaccttaatgtggtctttcctgtgtgctcacatgccctggtgtgtctcgtgtgtcctaatctcctcttcttatagggacaccggtgagcttggattaggatctaccctaacagcctcgtttaattaatcacctccttaaaggccctatctccaaatgtagtgacatcctgaggtactgggggttacggcttcaacaagtgagttttgaccagcctggccaacatggtgaaaccccgtctctactaaaaattcaaaaattaggcgtggtggcgggtgcctgtaatcccagctactggggaggctgaggcaggagaattgcttgaactcgggaggtggaggttgcagtgagctgggatcacgccactgcactccagcctgagcgacagagcgagactccgtctaaaaaaaaaaaaaaaaaaaaaagaatggtgtcagagaaggcttctcacagaacatatggcacgattaggattttgaaaaaattgagagatttccaggatggcaagatgaggaagggtattctatccagagcgggcagcatggagacaggaaaggtaggagtgtgccaagaagcgataggatacacagcagttcactgagggttcacttcatcataggcacactttccacacacgtgtccagatcacctgctcctcctagcgctcttgtgaggtgtagcctattactattctcattgtacagatgggaaactgaagctgaaagggcttaatttgcagaagattacaaaattaagtaatgcaactagcatgcacaccctagctgcttagttcctgagttcacgttcctcccaagccactatttcgcctcaaacagttgctattactgtaggatacattcaggatgaagtaggatgaaggagggtcggcgaggaggctggcagtcggcgaaagtcacaacatgaagggccttggaggtttccttttatcctttcatcctgcagccctgcctccagttctcccgggtcagaggagggggcgcagaatcaggtcctagaggagtgcgatgcgcgcccttggtcactagagggcgcagaagcgcaggccctggggaaggcggagccaggaggagggatctcagatccctgcgagtttgttgatttattctcagggatctgagaattctagaattcttcagtttagcactttccactgaaggtattctaaaatcatgcacacaatcactgcagggctgaggaggacccttaaataactaggaatgcccctcgagtcggtgtccacatttgcattcctggttatggcgctaatggtgccagatgatcccaaaaggaccagagtttactgtttaattcttcactcaaactggagctcagagatacgttctcaggggcctcaacgtgtgtgtgcgcgcctgtgtgtatgtgttatgtgtgtatgtgtgcgtgtgtgtgtgtgtgttgtgtgtatatgcgtgtctgtgtgtgtgtatgtgtgtggggtgtgtgtttctgtatgtgttgtgtgtgtctgtgtgtgtgtgtctgtgtatgtgtgtgtatgtgtgtgtgtgtatgtgttggttgtgcatgtgtgtgattgcgtgtacatgtgtatatatgtttgtatgtgtatgtgtgtgtatgtatgtgtctgtgtgtgtgtgagcatgtgtgtgtgtgtgtgtgagtgtgtgtacgtgtgtgtctttcatttaattgggttctttatgttacttgcatttgagcaatgctggtgcaggatcctgtgctccctggaggtatcccaggaggtgagcctaggtgtgtcaaggtgtcccgtgtggagacagtaataacccggggtgtcaggagctgtccagggagaagggtgagggtggtgcggctggcttctgtggagacggtgtggtgcagtcaggggttcatggactttggggtgctgaacctgacccagagtagccaggtaaccttgggcaaatgtcttagccactctgcaccttgctctccaggattgccatgaggatgaaaggaggtagcagagggaaggaataggcatctctccctccttctcctttcccccatcctctccctctctttccagccccctctctccctcaacctcattccctccctctctcctctctcctttctctgtctcccttccttcctccccctctcttctttctccctcattcttcctctttcttctctctcttcccttttctctcttcccctccctttctctccttcctgttctttctttccttctctctctccctcccttgctccctctcttccctctctctttccttttcactctctccttccctttctcttcctcccttcctctttttcctttctctttctctccctctcctttttttcttcctcactctccctccccttttctgtctccccatccctttctcccattttctccttctctttgccccttccttcctttctttctctccctctctctctctttctttctttttctctctctctctctttctttctctctctctctttctctctttctctctttctttctttctctctctttctttctttctttctttctttctttctttctttctttctttctttctttctttctttctttctttctttctttcgagacagggtctcgctctgtcgtccaggctggagtgcagtggcgagatctcgattcactacaacctccgcctcccaagttcaagcgatcctcccacctcagcctcccaattagctgggactacaggcttgcaccaccacgcccagctaatttttgtatttttagtagagatgaggttttgccacgttggccaggctggtttcaaactccttggctcaagtgttctgccaacctcggcctcccaaagtgctgggattacaggcgtgatccaccatgcctggcccctttctctctttccccctctttctctttcccttgctccctcgtctcccatttttctttctccccctcctctttctctctcttttcttctcttctctctcccccttccctctctgtctctctcagtctccccaggttcagaatgctttcccatttctttttctggcagttaacgcaccaaattgtcatcatttacttgttatatgtctttctagactgttatatgtctttctaggcttcaataggggaagtgacaaggagtttgtatatcattctaagggaacaggaagcccccagagggtatatgagtggacagtggaattgatcaggttttcattttcagaggctggctcttgccgctgtgtggagaggagggggggaggacccaggggcacagtgggcctgtaggggcgggcttgtaacctggactgaggtgggaatggcagagatgaagagaagtggacagatcaggacctggttttacacggaaccctcagagcctgctgacggatgacgggtgtagtcaggggtaaacaatattcaggaatcaaggagagctccaaggttttgacctggccaagcgggttgatgaagttgccttcgtggggatagtaaaagacagatggggagcagatttgggtaaaaagcaagagttctgtcttccacatgtcatatttggattgccaattgtaggtagatccagcatgtgctctgttccacccctgactctggagttctaggagaatttaggactggggacataaaattgtggttcattgacattcggatgttgtataaagccaagcgactagctgagatcccctggggagagtcatctcatatagtgaagaagacatgtcccaggcccagcccggagactgtggcattcccaatattgaaacttaagcagaagagttggagcctggaaaaggaggccaaggaggagccaccagtgagtcattggaaaaccagtagcacgtggagtctcaacaagaagaaatgaaagcatttaaacagagtgaaaattctggcaaacgctgctgagaagtcagatttcatacaaacacaggtgggcaaatcacccccactctgcatgctcagctaccagtcatggcacccttctccacacccatccccacttcagacagcacctcagcatccttctcaacacagtcttattttttcttattttattttatttttgagatggagtcttgctctgttgcccagactggaatccagtggcgtgatcttggcttactgccccctccacctcccaggttaaagccattctcctgcctcagcctcccaagtagctgggatggcaggcggcccccaccacgcctgactaatttttgtagttttagtaaagatagggtttcgccatgttggccaggctggtcttgaattcctgacctcaggtgatctgcctgccttggcctcccaaaatgctgggattacagatgtgatccactgcacccagcccatttatttatttctaatttttgccataggcggtgggggaagaaatcaacatggtgtttctggaaaccactactcatggattgaagatggcaggtaaatgaaatgtatttgccattcttcatataatcttatttcccagctatctagatgaagacattgcgtcccagagagatagttaccttggcaatacttcaccactagacatccagtattcacctttcagtctagcagtgtagtgatagggtcatgaggaaagacatatttgtgtggattctatgacttttttgtggcatccttgtgttgttagtcagggttatccacagaaacaggatgtgaagatgaaacgatagatacatagataaatagatgatagatagatataaatatacctagaaacatagatgatagatagataaatataaatcttttattatttatttatttatttgctgcttattcagtttttgagatggagtcttgctgtgttgcccaggctggagtgcaaaggcacgatctcggctcactgcaatggcatgatctcagctcactgcaacctccgcctcctgggttctggctattctcctgcctcagcctcctgagtagctaggactacagacacatgccaccacacccggctaatttttgtatttttagtagagatgcggtttcaccgtgttggccaggctggtcttgaactcctgatctcaggtgatccacctgcttcagcctctcaaagtgctgggattacaggcatgagccactgtgcccggccagatagatataaatcttttaataattattttaaggaattggctacagtgattgtagagacagacaagttcaaaatctgcagggtaggctggcaggctggagactcggtgaagagttgctattcaaggctgaggacagcctgccgtcagcattccttttttctttgggaaagtcagtcttttcttgaaggccttcagctgattggatggggcccatccacactacagtgagtcctctgctttacccaaagtccactgatttaaatgttaatgtcacctaacagatctctcacagaaacatctagagtaatgtttgaccaaatacctggctaccatgagctagccaagttgacacacaaaatgaaccataacacattggttgaccttagttacttctaagaaactgagttaaaagtggtctcgtctgatgtcggaaggaggggtaggggtggaaagaacaagagtggtggatgctggctgtccgttgctgaggaagcgtacctccgcctgccatggtgaacttggctttggtgatttttaaggcactggaaaactgagtaccctcataaaagcagtaacagctgcaatttactgagcacttactgtgtgccaggcatcctgctaggtgcttttcatggtttatcttgtttggaattactctggctccatctggcagacaccatgcacagctttccctgcctggggtcagctacctcctcaggcctctaactcaggaagttggctggacacaaggcccatgtctctgggacccaccaatctttccgatccctgctccacagattgggaaatgtttttcaagagagataacgagcaggagtttctcttctccttccttagcttgaagcttttgtcctctccatgtccccaggggcttaggcttttgaaaccaaatcctggaagacttctttgttctcagctctctcttctgcctaattcctccagagagtgggcctagctctttggtgagggaagggcacagggggacttttcctggaagaaaaagttggttaatatttttaaagacattaccccacctcattggtgacaatcgatcatgtcagcgcatctccttttcctggccatgtattttacttttcttttcccttccgtcactgcttccctgcgcctctataatgtcataaaggaagggagacgagctcaaagctttgaatatacctgaccattactgactcaagacaatgctacaggctcctgttttataagagaaaaagaattcatggaagcttttctggaatacggctttatgttcatattctacccactcctctctctctctcctcataactaaagggagctggtagcaaccaccctgctttgcagctcagctggtagaatgcctggagagcagccagtggcctgggttcaatctcctgataagtcatcaatttctttctcacccaaaacatctggtttgggatcctgagttatgagctaatattaaatataaaagtttatagcatcacatatataatgctgttgattagaaacatcaagaaaagtaattgactggaagggacttggtgtgaccagctgcttgaacatctggatggtatccaaggggcctgaattgaattcccaattcatccattcgttcttggccagcagtatctggtttgggatctttaaagatttgactctcctccttggctatggctttttctcaatgttttatacataagcgtgtgagtgtgtgtttcagttaactgaaaaaagctaaaataaaatcaatgtagtttttatcttctcttgcatctgttcattagacatttatggtttttatgatttcccgagcctcatcgtgttaccaacaatgaacactagggggcagtgtacactcatgtttttcctccatgggctaagatgtgtgaagagtgccccaatccacctctccatctggtttgcagttgagatgcccaagagcgggaagggttcctaccagcatggggctttgttctcagaaagcttctctaagatacgttacttagatacatccgtaaaatccctcagtcaactgcacccctgtggcctatagcctgaagttaaccaagtcttttcgtgacagcctatgttctgtttgctgaatagctgcctctccttcctttctcttttctgttgggtttggttcctgccagaacaacacggatttgcccatctcccctgacacactccggtccaaggtttaagcagggcagtcatttccttactggaatcccttcccaaacagcttcttcccaggctatcaggcagaaagtattttgcatctcctgtgccaactcagactgaggtagctgcttggagtattgttttgagaaggcctcagggtccaggctcaagagcaagaatgctatgctcgattggcaatgtcttcctcccttcccttccctccttccttccttctgttcctaccccactccttccctcccttctcccctccactccttcctccttcctttcttttttccttttttcttttctttcttattgaattccgttgaagagccaggtactgggctaaacatttcaatagtggacaagatcatcttggtttctgccctcacagaatttacaaaccaatgggagagacagtaaaaaaactgggcacgtggtaagccctatgctagggaagcaatcgcgtggtgtggggcacgcagaagaggtacctcacccaggcttgggggtgagtgatgaaacaaggatgcataccataaaaccaaggagggaaggggcaaagagtcaagagtcaagggggaaatgttagagcagaaaaatacatgcaggcagctcttgcttttcactttgctgctctgagtcaatctttgtctagaaaccacccatatccctcacctgcagatgtcttaagtggctctgggctattggagtggcaaagtctacggcctgcagtggccaggaaggtaagatgggtgatccagaggatcagagcaagctaagtctctgtgctccatctgagggggtggtgctccgtcttgagccaggcaacagtggctctgtaaaacgcaggctcagacagtgtcagatctcgggactgttttgcaatggaggctgagaactagattttatgtgaaatttcctgaaaatatttactaacactttatgggccaaaaagcttaggcatgaaggcaaatttaggcccttggggatctctggcctaatggcgcctttgcgtccatgtccgccacctagtggtggatgtgggttccttcactctgtttttctgtaacagcagccggaaccaacttccttccttgctcccttcttaaatttggcttttgatttccaaaaaaaaaaaaaaaaaaaaaaaaaaaaaaaaattgttatgaaacgtttagggtgccaccctgatggcggttttcgcctttcttttccggaaatcagtgaaatcgaagttggggcggatggggatgatgttgagaaggctgtttgggacgtggggggtgatgacagtgacgggcttgagcacctgctttgctggtgtgaacttgcaggctgattccaaccgattgaatgaaatatgattaccagcttgacctgtctggagtccagatccggagactctgagtgctccttgcaacattaaggatatatgattccatcgtgagagtgggccttctcagccagggtctccagagccttagggcttttttctgaatgggctgaattcatggtggtctttgagccccctagaaattgtgtgcaaaagtgtttgcttgtgcatttttcttggagagagctgctagcctgagtcagattctcaaagggcctataactcaggaaggggaaaggcaaggctgaaaaatgggtttctcaaactgaatgagtaccccaatgcttgttaaaatgcagattgtggctgggctcggtggctcatgcctgtaatcccagcactttgggaggtcaaggtgggtggatcatgacatcaggagttccagaccagcctggccaacatggtgaaactttgtctctactaaaaatacaaaaattagctgggcatggtagcgggtacctgtaatcccagctactcgggaggctgagacaggagaatcacttgaacccaggaggcagaggttgcagtgagctgagatcatgccactgcactccagtctgggcgacagagtccatctaaaaaaaaaagtgcagattgctgggtcccacccccaacgtttccgattcagtaggagtggagtgggaccccacaaattgcctttctagcaagttcccaggtgattagaccacacagtgcggactcctggtggcgagtaacagcacttagagaacaggtctcacgcattctgccctgatgctggaactcatagttgggaatcttgctttcaagcacaaagcaaaaacaaacaaacaaaaaatgcactgtgttttatttctggatgctgcctaactcctaatcccatcctttgctttgtcaaaaatattttaaagattctgggcaacaactcttccttttggacctttgacttaatgatttgctgcttagaagccaaaagacagtgagctggcttctggagaatgggaggctgaggagtgtgatggcgccgtaacaaggataggcagtatctaagggcaatataatcatatatacattaagaatatatcatatattcttaaagttgcaaggagcactcaaggtctttggatctggactccagaaagttcaaggtgttaatcgtatttcattcagtcgattggaatcagcctgcaagtagcagagatgcttaatggctgtctccctccacactggtgtcactgcattagaatttgctcagaggagtatcttggtggtggttgcgtgaattggttctgagggacatagcccatgtccccttagtacccttgtatgatgcacctgaagtttgtctaaggaatgactaagaccccttccaactctaggaatttctgaaatctgttaaaaagacacatcagaacctttaaattctatttccaggtaatctttgtccacctgccatgtctgctttcctggagaaagctcatagccttctgctgagaaaatcaccttgacatagagaaaatcaccttgacatagagaaaatcatcatccaagagcaattcagccctcattgcatgctagatgccttccttgccaagggcactaaatgtgccaacaaatgtcagtgtgctctgggaggtctcatttgcatagtgtgaggccccaagaataatggggatccaggcttcccatccctctctccatggaagctgggaaggttccaagcttctagcacagcactcggggtggccagagctttgtgggaacctgagtagggtatttggcctgcagagtctgggcctgtggaagtcctccatcacctgacttcccatctccatcttctctgtttcgagctttccctgtctgtctgcaaaattaaaaggtggatgtttgcctcttgagattgttgtttgaggaagtggaatagcacacaggaaagggctttgggttcctgtgaagtgggctctgcaaagtaggagagggtgggtggaattttccagatggcagaaataatagtcctcccagaggttaggactttccaggactttggtggtggccagatgtacctagtaatgtggctggtgggatccctttgcagccaggagctgagtcagtgggtaaagggtaaagtactcaggggtgggataagcaaggcgcctccctaacttgggaaaaatggaattttacgaggggaaatctctttgatctttgtaactgttctgccctccgctgggtgctgtatgttgagagtgcttggcagtagggagtgtattagtccgttttcatgcgctgataaagacatacctgagactggaaagaaaaagaagtttaattggaattacagttccacatggctggggaggcctcagaatcatggcgggaggcaaaaggcacatcttacatggtggtggcaagagaaaatgaggagatgcaaaggcagaaacccctgataaaatcatcagatcttgtgagacttattcactaccacaataacagcatgggggaatccgtccccatgcttcaaactatctcccactgggttgcttccacaacacttgggaattttggaagtacaattcaggatgagatttgggcgggcacacagcccaatcacatcagggagacagggaagggctgttttgatccctgttctttttggaaatagaacgggggttgtctcaccactttgggagagaacatgtggaccaggaagattctggtttcacagaatagcggggaggatgccactgcaggacattacaggttcacctccctgtacttttctgggagtcccagcattagatgaaagagagaggcagagtcatgtggggaaagagccctggatgggagtcaaatcctttagctcttgtctctgttagggcagaacctaggtatgatttgggacaagtctcttcatctatctgagactgtgttttggaaactggcccaatttcctcatacaactaatatttatgggtttttttttaaataaacagagaaattgaccctcctgttgttgaaatatgaaatttccctttgtctcattttagttccttcctcaagaaaccaaccatcaagcaagggactaaaactcatcagattactgcatccagataatgagatgccaggccacttatccattctgattgcttccttattcctccctagttcctgttttcccatcttccctgccattttagtttccctccaattttagtttgttggagagacagatttgaggctgatctcccattctccttgcctgctgcttgcgattaaagtcttctccagctggcaatacttgttgtctcagtaattggttttttgtgcagtgagcaatgggacctagacagaaaccctggcattctggtaacatttgcagatccataaaatgagggcattggatctgattccttaataaaaatggaaatctagcattcttgcctttctctttaatagggaggattagagaatttagaagttgaaaatagcttttttttaaaacccttgctttcaagtttattgaggtatcattcccgtatatgaatgcatccactttaagtgcagtggatgagttccatcagaggcatatgcctgagtaagcactaccacagtcaggagatagaaggtttcctcctcttgggatggttctctgtgtcccttcccaggcagtcccctctcatcccctcctggtcccaggtgacctctgccacttctgacttaaacctaacttttctctgtgctcactgtattagtgccccattgctgctggggaaaagtgccacacagttagtagctcaacacaaatgtattcacttacagttctggatgtcaaaagactaaagtgggttggcagggctgccttccttccaaaaactttaagagagaatctgtttccttgacttttccaccttgtagatgctgccagcattccctggctcatggccctgcatcccttcaatttgcttcaatcacctttccctccctgactctgaattctcctgcctccctcttctaaggactcctatgattagagtgggcccacttggataatccaggattatctcctcatagcaagacccttaactcaaccacatctgtggaattccttttgccctgtactcgtaggttctggggattaggatgtggatacctgtggaaggaagggaagggattgttgaacccaccacaattacacagcccaggaaaaacatccaagatgacagccaacttttccagatcagattccccatcagggggtcatgtttatcttctcagccacatctgcttctctgcttcaacttcacaatacaaggaggttttctccccgttcaaataaaaataggactacctaatattaattcttcatctcatatgtgctagacacttttctaagcactttatatacccttaactcacttaatcctcacagcaattatattaagtaaatgccatttttattcctgttttatcactgagaaaactgaaacaccagaagcctaaggaaatttcccaggtcatgtagcaaatatgttggagcagggattcagctgaaggaggctaatactggcctccttcctgtgagtcactgcacatatcagactgcctctctccatgtttccttagccatacacttgggaccagacagtttcctcattgcttgtgaaaaaatcagaacagacccaaatgtgccacttaggcctattgatcatcctgagtcaaaggcagttgagaaacagcaggtgctgaccttcttacctaaaaacagggcataaatttcccatgaggaatgcccttaatgtactaagaagaggagaacattctcatcactggagatgaagagcagatggcaagatgaatctgtacaaagaaatatactaaaataaaccttgctttctattcgttgcccccagatatttcctagtcacttttccagtttactgcccctagcccaaaccctttttcctttgtcttgactgttctccacaatttattgttaaaatggtatataagctttcatgcctaacaatttctttggatactcattttttttgtatatgaaggtctccatgtacacacaaaaatattaatatcaggctaggtgtagtgactcacacctgtaattccagcactttggaaggccaaggtgggcagatcacctgaggtcaggattttaagaccagcctggccaacatggcaaaacctatctctactaaaaatacaaaaaaaaaaaaaaattagccaggcgtggtggtgcatatctgtagttccagctacttgagaggttgagggagaagaatcgcttgaacccaggaggtggaagttgcagtgagccaagatcactccactgcactccagcctgagcaacagggcaagagtctgtctcagaaaacaacaaacaaacaacacaaaatattaatatcaaataaaatgtgtatgctttcctcctgatagtctgtgttttatcaactgaattctcaggcccaaccacagaacctaagagggtagaagaaaagtttttccttccctagagttctcacgcattgtatttcccctcaatttcctctttgtctctaccttgactatttttattatttttgtttcgtttggtttggtttgagatggagttttgctctgttgcccaggctggagtgcagtggcatgatctcggctcactgcgacctctgcctcccaagttcaagcgatactcctgcttcagcctcccgagtagctgggattacaggcgtgtgccaccacaccaaactaatttttgtatttttagtagaaacagggtttcaccatgttggtcaggctgatctcgaactcctgacctcaggtgatccacccgccttggcctcccaaagtactaggattataagcgtgagccactgtgcctagcctactctgactgtttttaaaatccacattcaaatcttcacttttccataaatgcttcccaggtcactattggcttgttgatgaaactgcagactcttccctcacccccagttcaccctgaggagtaggacgattgtgcatatgaagggtgaaaagcttggatggattagactggagaggttgggagaggagctcgtaagaccatctgctccctttcaggtgtcatgtggcattggtttgaactcttttcagaatgaaaagaacaacttacgggcttcagcaaaaaagaacagttactagctcaatgaagtgtaaaggccagaggcagacatggtagggaatcttcagtgatgactatatctaggcacttgctatagtttggaagttgaccctcctaacctcatattgaaatttgatctccagtgttggagatggggcctggtaagaggtgtttgggtcatgggggcatgtccctcatgaatggcttggtgccatcctggtggtagtgagtgagttcttgctcaactggttctttcaagagctggttgataacaagagactggcacctcacccttctcttggttcctctctcaccatgtgatttctgcacacactggatccctttcacctttcagcataaatggaagcagtctgaggccctcaccagaagcagatactggaaacattcttcttatacagtctgcagaaccatgagccaaataaacctctttattttaaaattactcagcctcagatattcctttatagcaacaccaatgttcaaaagatatcaccaggaatttgtcccactctacctctgagtcccacgctcctctttgtcggtctaattctcagatgggctctacccaggaggaagcagatggatattggaagctccaggcagatggtccattatcttagtatccctggcagaaagggaaggtcttgttcacaaatgttccaatgaaagtcttggggatgaggttcattaactttcattggctagtttggattgtatgcccaactctgaacaatcccagaagtagggggacttcttatttgccaagatggtttccttgcccacctatagaatgaagggaaagggccagcccatcctaaccttatagactgatggcgagaaagaaatggcctcctaaagcaaaatagggatgatattatcaccagaaaaaatcatctctggccatccaaaaatgacagatggttcttcatacactcttttgaatctgataattttagaagtctgctgtcctctttctgtattggccttggaaatatctcttgtcaaaggactgggtctacccctgcctatcagactgtttctcctcttaatgctgttttaaattctgtacttacaacaaaggagtcacgcagtcacacaggcttaatcaaaccttgacaaaatttgtctttatagctcatactcattccaggccagtaactggaaagccagttaaccagaatataggattgtgttagatcatggtgggctgtaccagatgcccttttcaaggcccacacacccgtttcctagctcctaggaatatcgttcatagctgtgagggctcacagtcatggtcatcgttgagaattgtccatggctacagggaactgctttaccctgagattacaaaagctcagccctcttacctcaactgcgggcatctctgaagagttactccaactgcagagctccctgttgtactggctgaggcgtcagctgcagctacattgtgggtcaattttcccctctgcctattcttgcctttcctctttccttactgctgtcttttccacagtgaactttctatatgcaactcattccagaatctgtttccagggaacccaataagacatctggactcctctctttatggtcagtccacttattgccctacaagaaataagtaaacttcaccttttaaagtctctaatttggggaataggttttctgttgtcctggtctaacctctgtcttaggtaggctctgggtgcctggggtttggggcatcttcttgggacaatttcaccggaaacaacacacagatgcaagcatgcaactgaattggctgatttcttattagttggatgaatattttgctgaattttcaagtgataaatgcagaatagacttggatggaagtgaagtgatcacgcttagtgggagagagaaaagcagatttgttgttctgagagctgttgtctcatgggtgtctctgctcatcactcaaggctcagttcaatgttacctcttataagaagcttttcctgctcgttaaaggcacttgttgtctggcctttctttttatgttttacatgtttttgtcaagtctttgcacacagacacaaatcattacaaatactgtataatgtctcctccagaaaggtgttttacaaacttcttttaagaaaacacatggaacataagatttattataggaattagatcctatacatcgtaggaggagttggggaatgaagatccagaaagaggagttgaaggatcggagaaatgtcatccaccagccctcctgaagcaccagcatagtgacgttaaattaagcttaccctaaagctgtctccttgcatatattttacattcagtctccaagttgctccctacatagtgaactggaacctaagcagatgtgtaaacaggttgtctcctattcttgtaccaatcaccgaattttggccaatcacaggcagccaactgttcaaaccctgttcaaacaaggcagaggctaagctgtaactaatttagctgcttctgtacctcatttccattttctgtacatcgctttcctttttctgtccataaatcctctccgatcacacagcagcgctgagtctctgtgaacctattctggttgggggaggaaagggctgcccaatttgcgaatcatgctttgctcaattaaactctgtcaatttaatttgtctaaagtttttttttttttaaattttaaacagtgaacatgtcagactttacagggcagtcttggaggcaggcatgtctagctgccagatttttaaatgtttttaccacagtccacagtaagaaacatcttttatatcaagatccggaaggaagacacacaaacacatatatgaacagttgagaacaaaacttccacaaaataacactaattcctaccttgtccaactgaggtattatcataaaatatgttttctctttgttactgattcttgacacagaactcctaaaacccttggaatttcctgagctataggagtgtcttttgtatgctaacaagatgactcgtagggtgaagtataagatagctttagaataggggctagttgtacaattaaagagttggacttttcagctgcaatccccaacctccaagagagcagagaagggctagagattgagatcaatcactaatgaccagtgatttaatcagttatgcccacataatgaaaccgctctatgaaacacagaactacaaggtttaggggagttctctggttggtgaacccatctatgtactgggagggtgatgtaccccagctctacagggacagaggcttctgagccctgggtccttcctgacctgaccttctatccttcatctggctcttcattggtctccctgataataaactggaatagtaagtgtagcattttcctgagttctgtgactcattctagcaaataatcatgatcctggtgggctgagggaggtcaccaaatgccagtgggacctcaactccagccgctgtctagattcttgacactattatgagaaggaattcaaggatgagttggaaaatagtgaaagtatggagatttattgcaaagcaaaaaggacacactcaagaaatgagcttatgggcatacccaaaaaagtcacatggaagggactttggcgttgttacctttatggatttctttaacacgagctggaatattcatgaaagttcctggaaaaagatttcttggaaccgtggtgccacccagttttacaccaaatatgggtgttctaggaacagtcatgatgctagtggatgtgtgttgagtatgttaatgaacatataatgaggtcctaggagaaacctaggtcaaagtcagtgccatgttaggtccagcctgcttggtccacatcctgtttttcagggtcttatcagtgcaagtagcctggagaccccatttgttgttggcatctgaagtagggggtagtcttgtggggctgagcctttaaactgtggggtcagtgctgactccaggtagttagtgtcggaatcaaattgaatggttggacatcaagttgggttggagaatttaagaattagttgttgttggtgatgtaaaagtgagaaaacactaatagtttctatcctattctatttttttgttctattatatttgcattttttacaacgctatttgtgactaattttataactctctattggccacactataaaaaacgctctgtaacatactggaagcttcttaagcacaggaacattgcaatttgccttagcatctccgcgcctaacacaacatccaagacagagatgtcaggtattacaatttcatcaaatacatgtgtgaatgaatgaatgaagttgtctgacttttggtatgattcatactggttcgggattcacttttatgaatttacccagtgtattagtgcaattcatactggttcaggattcacttttatgaatttatccggtgtattagtgcattctcacactgctataaagaaacacctgagactgcgtagtttataaagaaaagaggtttaattggctcatggttctgcaggctgtacacaaagcatggtgctagtatctgcttccagtgaggtctcaggaagcttcccatcatgatggaaggcaaaagggagccaacatgtcacatggtgagagatggagcaagagaaagaggagggagagggagaaaaggggaaaaaaaagagagagaaggaggggaggcaccacacacttttaaataaccagatcttgtgtgaactaactgagtgagaactcacttatcaccaaagggatggtgccaagccattcatgaggtatctatccccatgacccaatcacctcccaccaggctccacctccgtcattgacagtcatatttcaacatgagatttggaggagacaaacttcccaaccctatcacccggggacattcatacttaattagtgtgaatttgttcctcaaattctggcaagcctcacctactgggaagttaatgtgttagttcaccatgagaaccattttgggtggggtaactggtattggtcagcaggggaagtttgcttacaagtacagaatttatcaaagggcatcggttgctctaggaattatttccttcaaggtggggtcactagaattaccctttctagatgtttctctcaggacatgtctgccaggggcagctccacccctcgtttctgagaacttcataataatagatgccttatatttcttacatttcactattcttcttcttctttttcttttttcttttttctttttttttgagatggagttttgttcttgttgcccaggctggagtgcaatggggcgatctcagctcaccgcaacctctgcctcccgggttcaagtgattctcctgcttcggcctcctaagttgctgggattacaggtgcccgccaccacgcctggctaattttttgtatttttagtagagacaggattttgccatgttcaggctggtctcgaactcctgacctcaggtgatccacccggcttgacctcccaaagtgttgggattactggcgtgagccaccgtgcccggccaatttcactcttcttgaatggttatggagacaacgtggcttctgggtggagactgagggaacatcacaatctcatctgtaacacattgccaagaggcagttttcctctacagatggctaattgctccaatttcatgttccttcttattagcttcagtctgagaaggtaatattttctgaccttgttctgaaattctggcgctgaaccttctctgaagcctgttgacccttctgcactgaatacacacacaaaaaatagttgctgagtgattagactgatatcatcgaacacagttttgatttgtggccgacctggtctgacctgcaacatcttggttccaaaggctgttaggatcatccattgggtcagctttatccaagatgggtgaaggcctcttcccccaccaggtacgaacctccagccaattccactatcacataacgatcaatgcagatttcccagaacagaagacgaatgcatgaaacacacctcctattcattttccatgtggagcatataaaaatgtactttcctcttgcaaaggctctctgactgacccatctggtttgcatttatgtgaattgctgcctgccgagaaaagggttaatgacaacagggagggagaattctgtttccaggctgcgctttgcaggagttcagtttctcccaaaagtcaaacccaatcaaaaacaatccaggaggctgaggagcacttcctgttagccctgatacaactctatgtgagcaggacaaatgtggcactgagaaaaaaggagaagagaggatgacattttggccactgaaggaggcagcggcagcaaccgtgctgctgggagaaacatctgctgcaagtatggcctgcgtaataacaactagcgctgtaacagcataatgaaaatcacatttctgtaattgtataatatacaggcccaggattttaacatcacttgtctaaatgtgatacaaattggacacagaagcttggtccctttggcaaacgcttatccagagattattacattcatagagacataatttcggactggacttcagtcttattaaggcggacttccttttcagatggtccattctaaacattaaccccttcatgttctcctttgtagttctcctggaagttttcaagagtgtaccatccacccccaaacaaagaggaacacttggatgtgtgggctgggacactttgggtggttatttccttaagggctctcatggaaaagaattcacatgaggctaaagtgaatcttttttttttttttccagaagggccagtgtctggagatgtttcagctggaaagatggccaagctcgaataagcagatttatataaatctcattgtttccatattaataaaatgagccgctgggcacagtggctcatgcctgtaatcccagcactttgggaggccaagatggatggatcatgaggtcaggagttcaagaccagcctggccaagatggtgaaaccccgtctcaactaaaaatacaaaaattagctgggcatggtggtggacgcctgtaatcccagctacttggcagcctgaggcaggagaatcgcttgtactcgggagttggagattgcagcaagccgagatcacaccactgcactccagcctgggcgacagagtgagactccatctcaggaaaaaaaaaaaatgagccgggatctttgatgactttatattttacatggaggctgttattatgatgcaaggacttgttctttcggctctaagaccagaaggaaaataaaatgggatagtatattaaaatgcaatgtgggacaaagcagtgctatatgtgaccagtgaaaatgtttgcagttctttctctataagaagatgattttgcatcccatatttgctaatactgcactccactgagcccaatgagaagttatcaatactttatcatatgaaagcgtgttgaaatttctcatatattgtctggttcagccttcaaagcagccatgtcaggttaagcagggcagttatgatttctatttttcaaatggttcagtggcatgtgtagtgcacacagatagtaatgggaacagctgcatattcacacctccgtggaagtttccacgccacactgggtgtcctttcacataattcccctctgttatcagcataatccagaaatgccacaaagtaacatccataacccccaagcaacatgaaaacgacagctactgctaaaatccatttgcattaaaccagcactaacatgaaatccacacatttgatttttttttcttcatgtcccagtggatatctcagaataacagggcacttctgatctggtttctatgaatttcttatgagctacaactgtgctattcaaagtgtggtccacagatcagcagcagcagcgtcacctgggactgtgtctgaatgcagaagctcaggctccagcccagacccactgaatacagagcctgtgttttcacgacagccccgcatgattcatacgcatgtagtgagttgagagccgccgcgtctacaactcatgctttcgctcagccctgcctgttgtaggtagtgagtttgtggtttaaatctaagaagaggggaggagaagcgcacaggcgggacatacctgcgtgctcactttcagtagggactggaggagaagacagtttggagacagggaaaaaccgtggaagacagaacctggagaagagttgggaacctcagaggaggttgcaaatagctgtctgtggacatctggtttgtggtctcaaggaaacagagacaatattgatttttgaaacaagaggggctccaagtgcctgttattcgggagcactttgagaaacactgcagggctcctgaaggaggacagagtcaggctaaccatctctagatgcagtgacctgccaaatgggctgttgggctggaagaaatgcagattgcttattgcttccatttatccccgggctcctctcctgtcatcctcctttctcggcttctgcagtcccagctctgggcatgagacttacggctccctcgatccagcatcaggacctcccctctagttgtactaacttggctccctcttgaagctcagaatttatgcaaccaaagcccagattccttcactggtgggtctgaaaccaaccccctcctctcctgctctgctcttcctggcctgcatcttcgctttgcaggaggtgccagacgtcaaattgccccacattctgtggcttcgggacccaggcaaacgtccatgaaggagaaacttgtaaccactgggacgcgggatgaatgcagggccctggactctgttgtgggcaaatacgttgagcgatttgaaatgactctcccgggagctggttgtcaaatttttggtgtgttcaggaaatgtctgccacattttacatcaacattttcaaacggtaagtgagtgaagtgttgaattgtaacaatgagtgagtgaaatgaatggatcgcagctccagtggtaaaccagcttgggtaatagaagtaactcactttttaattacgaaaaaagcaaagaaaagcattggtgtagcacaactgctcctggtgctttgctgcatggaatttaaaacccatcctgatgtcatgtgaagccacagtatgtggaagtcttttatgtggataatgggtggaaagaatggggtgcattttggctatttgccatcactcatatttcgaggtccagaagggccaaagtcaatcaaaattcagttaaatatgcttctaatcatcttcttattcaatactcccgggtttgttactgaaagactgcaaggtatttatgttactatctttgtgattctcagctgcttaaaactctactcaaatccaacttcctccctgaagccgtctgcccagcggggatcaatgtctccttctagctcctggtacaacttctgcagttatattatgtgaggttctgctttctcatatgctgactgctggcttagacacattctcttcgttcatcttcccaccacacctgcacaagaagaaatgggagctcagctccatcagcctgctggaggtcaggcagctatgacggggcaggagcagtatttgaactcaggactatgtgctccgaagcctgttcttgtctctgtattaatggttctcaaagtgtggtccttggaccagcggtatcacctgggaacttgttaaaaatataagttatcaggccctactccagacgtatggaaacaaaaacttcgtggttgaggcccagaaatctgtattttaacaggccccttggggattctggtgcatgcttaagtttgagaaccactcttccatacccagcttgcttctgatgtatggttctgtgatatgtgttatcttggtcactagactgtaagctacctgagggcaggacttctgccttattcacttgggagcaagacactatactaggtgctgctgtggaaatgtaacaagagtaacagcggacatttattgagctcttcacgccacatggcatgctaaaccttcatgtggtttatattattgaattctcagaataaccccttgaggtcagcactattattatctgccgtttacagatcaggacactgaaactcaagtgggtgaagcagcttgcttaaaatccaatgccatgcatgaggaagctgggatgtgaacccagaggttctgactccagagcccgtgctcttacccagcaggctgccctgttcagtgcatgcttcccgaattgactataaccatctgacctcttccatgcatcacgtgaagaaaaagtctcaactgtaaataaggggagaaatgtacacagagcagcttgcgaggatagagagggcttggatgtctttctgaaaggaagccatcattttctttcttttctctagagacagggtctcgtttcatcacccaggctggagtgcagtggtgcaatcatggctcactgcagccttgaactcctgggctcaagcaatcctcctgcctcagcctcccaagtagctgggactgcaggtgtatgccaccatgcccagctaatttttttttgttgtttttgtggtggggtcttgctgtgttgcctagactgacctcgaactcctggcctcaagcaatccttctgccttggcttcccaaagtgctgggattataggcatgagccattgagactggccagaaggtatcctttttttagagaaactaaaagcattctcaagctcccttaatttcacttctgatagatgagttatcttgacctcctgttcaggatagggccaaatctactcagtcctgttgtatccagggtacttaaatgtcttgaattcctgcaccagaaggtacagtcttctggggagtcacagtagggggtgagggggcacaggggagaggagggtctacaggttaggactccagcagtgatgcttgaatttgaatcatgattgtgctgcttgaaatcaatgtcattttagatataagctgcttacactttctggaactcggtttcttcaactgtaaaatggaaataatgataatagctgttttatttgtgctgagcaggaatgagactgtggctgggagaatgctttataaatcaaaagggatgtctggaaagttcagtgttctttcctggaccattgggagttgcagcgtagggaggtattgaggaggtgcccaccagtcttgatttctaacctgagattctttttttgttttgagctggagtttcactcttgttgtccacaatggagtacagtgacacggtctcagctcactgcaatctcccgggttcaaggattctcttgcttcggcctcccgagtagctgggattacaggcaccccccaccacacccagctaatttttgtacttttagtagagacggggtttcaccatgttggtcaggctggtctcaaactcctgacctcaggggatccacccacctcagcctcccaaagtgctgggattacaggcgtgagccaccatgcctggcccaacctgagattcttttctgccagacttccttccttagaacacaaacatgtgatttctcagtgcttgccagagatgcagacctgttcctctgaggctggaaatgacttcacggtacttttcaaacagtaattatctacagaaaagcgccctgagaccctcggagaccaggagccgagaaccccttataaggacacgatgctgtttctcatcccaaccctcaagataagggcgtttctctgcctggatttgtagaatccaatttggatgcctggattctgggtttcccccatggaacagactccttccccctccttctcacccatccctcttcaggcaccaaagccccttccaaaatgtcttcacctttcacatgacaccagcactcaaatccaccattccaaataaatgagaaagaaacccctttccgccaggttttgcttgtgccccggcaacccaaagctaggatacagtttcatggcagggcacatgtgtgtgtaattgctacctgagaggaagaccaggagagcctgctcgaaatggggtgttaatgataagcaccacaagatttgttactgtagtgaagccccatctggatggactacattaagttgctttttaatgtggccctttgatgtggcccttcatagagtccctccagtgcttgttagttagggagcatcccacgatagaaaaaaaagcaagaacaaaaccataaacgagaacaagaaccaccccttttgctcagctgaaacactacaatcatgctagtttacccacctgtcagcttctttcagacctgtgaccacatctagggataggcttccttagaggaaaggaacttgaaactgtgtttctggatgcattgttttaagcatcaattattttttttttttttttttgagatggagtcttgctctgtcgcccaggctgtggcacgatctccgctcactgcaagctctgcctcccaggttcacgccaatctcctgcctcagcctcctgagtagctgggactacaggcgcccaccaccacacccagctaattttttgtagttttagtagagacggggtttcaccatgttagccaggatggtctcgatctgctgagctcatgatccgcccgcctcagcctcccaaagtgctgggattataggcctgagccaccaagcccggcccttaaatatcaactattgagcagttaatgaggaatcggaatatctagcatttagtcagaaatgtgaggtttggaaaagactaacttgaacaaatttcaggaagatttatgagtagtagcttttccatctgtaaaataggcttcataatacctgtccaatctcattttatccttccaaaaatgctgggcatggtggctcatatctgtaatctcagcacttggggaggctgaggtgagaggattgcttgagtccaggagttcaagaccagcctgggcaatatagtaatactctgtctctacacaaaattaaaatgtttttcaggcatggggtgcacacctctagtcccaactactcaggaggctaaagtgagaggatcactagagcccaggaggttgaggctgcagtgagctgtgatggtaccactgcactccagcctgggtgacagagccagaccctgtctcaaaaaaacaaaaacaaaaacaaacaaacaaacaaaaagggaaagtaacccaaaagaaaataaaagaagaaaactctttgaggtgatatatccatagaatgatagcattgaaagaaaccatagttagagtttaggtccaaccacctcattttctgaaccagaagacagaatcgcaaaaaaaaccagagcatcctgcctgaggacacagaattgctgagtagtaggaggaagaagaacccagattttccagctttgagaaggatggtggttagttagaattttggctaaaacagagccttgctaattcctaatctctcctctgcaaatgacttcagtctcattttcctaagcagcagagccatttggctggcacaaagtgtggctgtggccctggcattctccacggaatgagaaatttatcccacttctgttctcatcctacgtgccaagcaaacaaaccatcttgttgactgcagacatggcctcgggaatcctagccagccagaaaaaccattccgtctctcttgatgaggaaaccagtgcttggaattcaatagatgtaatttaaataggctgaatccaaataaaattctacattttcttagctatgacatcttacttactttttcttttatgaagacatgctgtagagtgaatgtatatgtcctcctgaaattcacatgttaaaccttaatgcccaagatgatggtgtttggaggtgggacttttaggagtaaattaggtcatgaggatggagcccctcatgaaaaaaattaatgtccttgtagaagaggattgaaggagctcactcttcccttccaccatgtgaagacaagcaagaagatggccatctataagaagtgggcagtccccaaccaccagatctgtccatgtcttgatcttggacttcccagcctccagcactgtgagaaataaatgtttatcatttataagttacccagtgtatggtatttttgttacagcagcccaaacagactaaggcaaaacaggacaattagcttgataaaacagggaatagttggagccttccattgtggttgggacctgtttgagtgtctgcgttcctgtcagagaaatgatagttttaatcgtgtagtcctcccaaaaaagtaaaattgcgggtccaactttggaatttacttcagccaactgacgttgcacaaataaataaattttctttctctcatttaaaagcaaaaagagatttctagaatgtttgcggtgtgtggcaaatgggagatgttaatgttttctaaatgctctcaagaaagacccgatgttcattggtgttcatctatattctgagaagggatttggctgtagtgcattgtggtgaacacaatgggatatgtttcattaagactgcactttcctcttttaattaacttcttgttcctgtctttggtgaaatattaattattttttaatcatcactgggatgcactttaaggagaagcgctggaatcatccaaccttagtttcattatatggataggtgttataataattaacttaattagcttgtcactgcttgaataaaatatgactgtatttggagaacagatattgctttgctgatccaaggttaattaaaaaatagagtgtgcaaaaggtcaggttaaatggagttggtggcaccctgatatctggccagcgtgatgaagaatgtaaaatgcaagtgggctgggaccagaaaccagacagagtggggttttgaagccatccttgagtgtccacacctgaaagagatggaatcaccatcaccagatccaggagtctgcagcccacttgtgatattctctctctacatcagtggttattgttctggactcttgggtagggggtcaccctgtccacagaatagagggaaaaatcgatggaacaatttctttttctttctttctttcttttttttttttattcttttgagattgagttttgctctgtcacccaggctggagtgcagtggcgccatcttggctcactacaacctccacctctcggggtcaagcgattctcctgcctcagcctccccagtagctgggattacaggcacgtgccaccatgcccagctaatttttgtatttttagtagagatggggtttcaccatgttggccaggctggcctcaaactcctgacctcagatgatctgcccacccccgtcttggcctcccaaagtactgggattacaagcatgagccactgcgcctggcctgaaacactttctttaagtggaagatggttctttttcatcccttgagatctggatgtccctgagcgcaaggtaataaaaccaggaacgaatgtgctgggtgggaagctgctaacatttactcaatgcttttgatgtgcctagtactgagctaagtgattcatatgtcataactcacttaatcctcacaacaattcttattattttttttttttgacggcacctagctctgtcgccaggcttgagtgcagtggcgtgatcttggctcactgcaacctctgcctcccgggttcaagcgattctcctgcctcagcctcttgagtagctgggactacaggcatgtgccgtgatgcccaaataatttttgtgtttttagtagagatggtgtttcactgtgttggccaggatggtcttgatctcctgacctcgtgatctgcccacctcggcctcccaaactgctgggattacaggtgtgagccactgcacctggccgaccctcacaacaattctatgaggcacatagtattattcctgttttagagctgaggaaaccgaggcccagagagatgaaataattcatccgagtttacatggtcagtggtagagccaaaatttaaacggaggtagtttggctccagaagctaattcttaaccactgctcctcaataattgcttttgcatggaatattgctatactatgctgccaagtcgtaacagtaataagaacaaataagattattcctggggaaaggagacgtaaaatgcagactcacacctccagtagcagaatctcttgcaatccaaacactgattttctggtgttccagaatgtttcatcctaataaaaaaatgccgaggagctggcctgggtctggaagagtaattttgctcactcctcgtcaatagatgggtgtgtttgatgtttataactgtttttgttttgttttgtaattacatagcagttcattaaaggttgatttggttcccctatcagtcaagccttctaacaactcatttggaagagtaaatatcctgcacagagaaattcacagctttggtcatgatgagataagagcttgctgcagcccttgaatatggctcgtctaataagggttgggccgtctggaaaataatggaaatctcaaacagaggttgttacaaaatagtgcaagatgttgttggcatcagccgtgaaaggttaactgtgctctttggtgactggaaggaaatttcatattcaacagatgctacctgcattatagactgagatggatgatgattgacctggaaggcttgtctgcgtttctgagaaaatgatctcaaaatcgtttgctctgattcctcatggactcctgggtttgatttcacatgatggtttactgactctctcaattggaatgaccgaaatttattttaaacttaactatttgctcaacgctgctattattttactttaggctgttattaatttgccctggtgtggtgtgtggtttggattccaccgtgctgatgtggtttgtcatgtatgatgctgaacataggacagaagcttggaaaggaggaaaatgaaaatggtaccccaaaaagtcagttcatattactgtgactgtggataagctgtcatatgctgctactattcggatcaatattgtccttttttagatctttatgtgatccaaaaggtgcagagtaatttagtaataggggaagcattatgggatttacatacccaggaagaaaaataaaatccagaagaaaaaaggataaattgctattgcatatacagaatattatctctcactgtggaaacagtgatgccttcaatgagatgcacactctagggttagagggagcttggccctgagaatcggacaccattaggtttcttgctttagttctccccttccttgagctgatgagggaggggagatggcagaaaacattatcacccaggcagccacggtaacctggagagatgttcttgtgaagtgagtagattaacaaagtatggtgtgtccatataacagaatactactcaccaatagaaaggaataaattggccaggaatggtggctcacgcttgtaatcccagcactttgggaggctgaggagggcagatcacctgaggtcaggagttcaagaccagcctggccaacatggtgaaaccgcatctgtactaaaaatacaaaaattagccgggcgtggtggcgggaacctgtagtctcagctagttgggaggctgaggcaagagaattgcttgaacccaggaggcggaggtctcagtgagccgagatcacgccactacactccagcctgggtgacagaacgagactccatctcaaaaaaaaaaaaaaaaaaaaaaaaggaacaaattgttgacacacaaaacaacatggataggtttaaaaggccttacaccgagtacaagaagccagactcaaaagtaacatattacagaattgcatttatatgacattaaaaaaaagacacaacttttgggacaataaatggatcagtggtggccaacgtgacgtgacgggatacctgactatagatggatggcaggaggcagtttttaaggtgatttaattattctttattcctattatagcattattcacacaaatctttacacatgctgaaactcatagaagtgtacatataccaagaaagttacaattactgcctggtcatttgaaaaataagtattgagatgttttgttgttattttaattaaatcacttccatattttattctaacattggcttaaaaccatgtcccaaagatctaccacgtttctgtcatgttaaattgccgccctgttttctcgtatctgagaattgtcggggttttccatgaagaatcaaggagtttggaagtgttagtgggttggttgatcctttgggggacctctaccaatggagcctaggagaggcgcaaggacaggtgtcgagatgctttcttatccaaatcagctttttttgttttgttttgttttgatagagtcttgttctgttgcccagactggagtgcagtggggcgatcttggctcactgcagcctctgcctcccaggttcaagtgattctcctgcttcagcctcccaggtagctgtgattacaggtgcataccgccatgcctgactaatttttgtatttttagtagagatggggtttcaccatgttggccaggctggtcttgaactcctgacttcaggtgatctgcccacctcagcctcccaaagtgctgagattacaggcgtaagctaccatgcctggcctaaagccagcccttttcaaccatgcttccattctaggaacaagaaccatgcaaaggaatggttgggcatgtgtttgttttatgagaacttcagttacctcaagtaatgggggcttattgaaaatgtacactagcatagaacccaggaaaagccagacacggaggcctcaagaagagtaggaagctgcagatgggtgtcttcatccgttcttgcactgctattaagaaataactgacactgggtaatttataaaggaaacaagcttaattggctcacagttctgcaggctgtacagaaagcatagcagcttctgcttctggggaggcctcaggaagcttccaatcaaaggggaagccaggcatctcacataggtaggagcaggaggaagactcgggggaggtgccacacaaattttgtttgtttgtttgtttttcagacagagttttgctcttgttgcccaagctggagtgcaatggcacgatctcggctcactgcaatctccgccttctgtattaaagtgattctcctgcctcagcctcctgagtagctgggattacaggcacctgccaccacgcccagctaattttttgtatttgtagtagaaacggcgtttcaccacgttagccaggctggtctcaaactcctgacctcaggtgatctgcccgccttggcctcccaaaatactgggattacaaatctcatgagaactcactcactaatcatgagaatggcgtcaagggggatggtactaaaccattgatgagaagccacctccacgatccaatcacctcccaccaggccccacctccaacattggggattacaattccacatgagatttggttgggcggggacggagatccaaaccatgtcagtgggatgaatccaagatggctcagtggacttccacagctggagctggtgaatctttgctctgggttccaccattcatcatgattaagctgatcttctcctgtctgcttcttcctgtctcactactaaatggtttattctttaccttaattcttcatatcctttctctatctcatagcttttcttcactaaattcagctaatggctacagctgtacctcagttcagctctcactgctaactgtgtgtttcttgctgcataggaactggtccatttatggttttgtgccagtccacatctcaggttgctggccagcttacaaatggggtcctattactaggtgtgggaaaagccacctggcttttcgggctgcatcttcatgggacagtcttatctggaagaggctgtgggcttggaggcaccatggtaaccccgtggaggataatattccacaattagcaaaccatataaaataggacataacaaaatggcacgttttgtttaagaaacagtaagagtcaggccgggtgcggtggctcaagcctgtaatcccaacactttgggagctgaggcgggtggatcacctgaggtcagaagttccagaccagcctggccagcatggtgaaacccagtctctactgaaaatacaaaacttagctgggcgtgttggcgggcgcctgtaatcccagctactcaggaggctgaggcaggagaattgcttgaacctgggaggcagaggttgcagtgagccgagatggccccactgtactccagcctgggcgacaagagcaaaactctgtctaaaaaaaacaaaaaaaaaaaacagtaagagtcaaagattgtgaaaagtctgcctcatttatttcttgctggtcttggggtggagcacagacaaatgaggacataagcagtatgatgcgatgggccttaggtgcccctagatgtgggcatctgggacaacttctctcatggcgattcctgcagtaccagaggatttcttaagtaccttgagctacccatggtggaaggattagttctcccactgcactagcagcttggataatttttcatccacaaggtgtgccgatgcctggctcctgggatagagaactaggcttggagccataatgggaagcaaatctctccggattggggcacatgaagtgatgaaaagctttgacggtgggtgagaaggagtgctgatcccacaaccggcggcatggcctctattaaaaccaggcctcctgccccatcagacacacaagtttctcttaactctgcccatcaggtatgaaaacttttaggaaaataacattgaccaaagcccagggctgcgactggggaagtgatccttggtgtgccgagacatgagtccgtgacatctggaatgatcctttggggacatttggggctccaattaaatatgattcagcctgggtggtcaggcaaaccctcagggacccatgtgaccggcccgaagttttcaccactctccacacagaacagtgttttcaaagcagtttgaagcacattgtactcccatttaaaaaataaccccttgcagccgggcgcggtggctcatgcctgtaatcccagcactttgggaggccaaggcgggtggatcatgaggtcaggagtttaagaccagcctggccaagatggtgaaacccatcttcactaaaactacaaaaaatagccaggtgcgatgtcaggcacctgtaatcccagctactcgggaggctgaggcaggagaatcccttcaacccgggaggtggaggttgcagtgagccaagatcacgccactgcactccagcctgggtgacagagtgagactctgtctcaaaataaataaattaattaattaataaaaaaaaaacccttccatatttaaacacatttaaaactgaaacaaccatagccccactcccgagggatgaccattgtttacattctgctgtatgtctttccaatattattattgtacatatatttggaggtaaaatagtctcataccatcagtctgcacagttcaatatggtagccactagccacatatagctcttcaaattagaatagaaaaaaaactaaaatcaaaattaaaattcagtctctcatttgtagtagccacacttcaggtgctcagaagttgtacatggcttttgggaaatacagataaagaacattttcattaacacagaaagttctgctggacagcattaccgtagctatagtcctaataatctttactcactgtgaccatcttttcgtgttataaaatatgactgtgtagtatcatttttaatgactgcataatattccattgtgtacatctataatcaatcacttttttttcttttttttggtgagactgagtctcactctgtcgccgggctaaagtgcagtggctcgatctctgctcattgcaacctctgcctcccgggttcaagtgattctcctgcctcagcttcctgagtagctgggactacaggcatgcgccaccatgccaagctaatttttgtatttttagtagagacagagtttcaccatgttggccaggatggtctcaatctcttgacctcgtggactacccaccttggactcccaaagtgctgggattacaggcatgacccactgcgcccggcctgtaatcactttctaaaaaccatttctctaaagttggaaattcaagttatttctagtttgtcactattataacaatgactccataaaccttttttttgagagggagttttactcttgttttccaggctggagtgcaatggcttgatctcggctcacagcaacctctgcctcctgggttcaagtgattctcctgactcaatgtttatttgcatgtgtgattacttctttactattactactggagcagattgcggtttttacacatttttcattcctagtacaaaattgctttccagaaagactgcttagattgacacttctcaaaagtaaggtatggaagtgcttcttatcctaaactagacaacaattgagaaatttgttgtcattttgacacttgaagcagcattatcccaaagatgttttgctttgcaactcttggatttctagtaggatttataaccacttgtattttttttgtgacttgcttttgccgagtttttaaccaaaatgtatatccttttctaaattgagtcatacaagatttttttttttttgagacaggatcttgctctgtcacccaggctggagtgcagtggtgcgatcttggcttaccacaacctctgcctcctgggttcaagcaattctcctgcctcagcctctcgagtagctgggactacaagcacacgacaccacccctggctaatgttgtatttttagtagagatggggtttcaccatgttggccaggctggtcgtgaactcctgacctgaagtgatctgcccaccttggcctcccaaagtgctgggattacaggcatgagccaccgtatccggcctcgattcatacaagatctttatatatggaggggtcaagtctttaccacataacatacaaaagctttttgtgtttatcatttgcttttcatttttaaacttacgaatattataaaatcatatttagttgaatttcacagtgttttccttttagatttctgcttttgataagatactttagctctatcctgctaaaaattacacataaatatttactgttttatggtttacttttttaacacctaaaacatttaatacatctggaatttatttagggtgtggtatgagttcggtggttatttacatttaccttctaaatggttagccagtttttcccaatttgttgaatgatttattctatttctactgattttaaatttcacccttatagaatactatatatatatatatatatatatatatatatatatatataatatttcctattctagttcattactgtctttctaatttggcacaagtaacatattgctttaattatttgtactatgtgtcacatattaatattggtgtggcaagtcctttttgtaactcttcttttccaaaatagttttggcttttatagcatgcatctccttccgtatgaatgttaaaattatttggttaaaattttagaaaatggccctgtcaaagtttccactgacattgttaaatgtaaaactaaatttgtgaaaaattggtttctatcaatattaaatttccccttcagaaatatggtatacttttttgcttattttcattttttatatctctcagtaaattttttttagtttttttccatcatctaggccctgaatattacttatgaatttcactcccactttgccaaaaacttggataaattttcttcagtacatacttggtactgggctcggtggctcagcctgtaatctcagcactttgggaggctgaggcaggtggattgcctgagcccaggattcaaggctagcctggaaaatacagcgaaactccagctctacaaaaaaaaaaaaatcaaaaattagctgggcatggtggtgcacacctgtgatctcagctactcgggaggcggagatgggagggagaatcacttgagtccaggaggtggaagctgcagtgaactgtgattgttcttctgcctgggtgacagagcaagacgttacctgaaaaaaaaaaaaaaaaaaaaaaaaagacgtacttggccctggcttctggggagtaatggggaattaggctgggagccataataggaaatctcctggacggaggcacatgatatgatattaaacatttttaaattgcttttataagtgagattttaaaatgtcattatatttctttgttttttttttgagataggatcttgctctgttgccctgggatggagtacattggtacaatgacagctcactgcagccttgacctcccaggctcaagcagtcctcccacctcagccccccaagtagctggaactacaggaaccaccacacccagctaatttttggattttttgtagagacagaccatgttgcctaggctagtctcaaagtcctgggctcaaaagatccccctgcctcagtctcccaaagtgttaagattacaggcatgagccactatgcccagccctccattgtatttctgaacatattattaagaatatataggcaaggtataaatgttaggtatttattttataattaactttaatagctttgtatatttatattagctataatcatttttaagttggatatcttgggctttgcaaagagataatcatattatttgcaagaaatgtttgtcaatatttagaatttttacttctttttcttatagaccaatatagtatagtgctaaaaaaaaataggtgtttgagacagacagacctgggctaaatttcagctgcaccacctattaacttgaaccttctgcaatttatccaatctctgagggtcagtttcctcaaagaggaataataatacctactttatggagatcttaggaggattaaatgaaatattgtctataaagcacataaccaattagctggcatatacagctgctattattgcttgtctgattgcattggctggaactcccagaacgttaaataataatggtaattgtggacatctagactttaatggtaatagagtcatttctaaatgaaaataccaggcactgttgatgatgatgatgactaacatatattaagcatttgtgccccattcagcatatatatcatagagactattgcagaaaattaccccagcatcttgcatacttgctcttgataacactgcttttattcactcattccctcattcaattaattcattcaacagacatttgttgagcatgcctagaggctcttatttaatatgcctcaattctaactatcttcattttggatatgatgttacttatgtgttgaaggagggagaaacagatacagaaacaggcagtggaagataactgcattgaggcttcatgtataaaccactcatagagctacctatgtgcatagattatggcgctatccttttattatgtccattatgcctgggctgtctggcctcattgaaagcaaagaatgaggtttagagtttgtaatgagatgaagaatggggctgagctttttctgacggaagctctccattcattcaaccatcactggctggtgctagtaaaaataagatgggtaaaatgtggattttgcctttgagtcttcataactgagaaaaccaggagtgtgaggaatattattccagaacatacaaagttgacgaaaacatagagagagaagtgctggtgcaggaaggcagggggcttgagggcttgtttaagggtggggacatggggctatagagatggtggagttaggactggcctcccagagttctgaagtcatgagagattggcaagaattttctgggtgggcaggagagggcatactagtgatgggaacgattatgcaaagacgcagagacttgtgggagtgggttgcttagtctgccaataaacagcccattcttccacagtgaagttgtatggaaaataagtggattttgtgactgaatttgatttgatgtagcccacctacaaactggagcttatcttggatggtttaatgaggtcagcagagtagagaagggaaacaactatgccttgttaatattcatagtcatgatatttactgggacaaaacaaaaataaagccccacaatttaacctttgctggaaaaaagattggggaccaaatgagaaactgaaagaatttactgccttttgtaaatgcaaaagaatgaattaactttcttcaaatttgctcagtctttctatttctcttcccatttttctcctcctagaccctcactgagcagctagtttcttacaaaatggatgataaatattagctgggagcatagaagaagattatttaactatctccctaaaagcatatacaaatggtgtacacaggaatgaattcagaatttggggattaattcatttttcctccagagtcagcttctccttctttctctctgtaccctgcttcctttcaggtatttgggtttggcaggctattaatgggtggaacccacagacacaaggaagtgattttataggctttcttctgggcttatgtacaatttttaaaaattccttttgatcctcaaagatcccagcagccaactctggttaacatcaccaagaagccagccgcacccagagctgtcctaggagctagacttctcatatgccaaactgctggcaattctgtctccttgcctgagacaggaggcatcttgagaagattcaaatgaagggaaatagagagttggataattaacatatgaatttgattaatgtttacatctgtgaaaagcattttgtaccaaataaatatcagataaatttcttaaaacttccatcgccgtctttccctctctgggggaaaagagttgactagttttaatccttgttttctacacaaaaattcctgagtgtgggtccagtaagagcttaagattgatcctgtcctggtcatctgaaacttcttcctgtttttctaaaattcctagaggtgtttgtaatggaacgactactagggcacattgaggggttgtgggaaatgcagggaaagtggaagactggagaggagcaagtgaacagattttcaaaaggggatacctcaaaaagtaaccatccctgtgagctagagagcaattattgtctaatgaggctggaccagtcctttagcttgagacctttggcctttgatgaggcctgctgagcagggcatttgatggctttttgagcacttacaaataaaaatggccatgtattagttatgagtgtgttcccgactggacccattgctttaatgggattactaggctagttctatcaaggaagtactggaatcctactgcatattaaccaacatcttgcttaatcacttcattgaatttgagtaaggtttctgagttatgcatgcaaagtctctccatgtagataagatagaaaattacagattggtgataatgtaatgagaaagaattgcatgccattgaacacctgggttccaaatatgaagaacaaagattagcatcaatctgggagattattttagtgctgaaccacagggccctgtcatataggacgtttttatttatggcatgtttgaaggcaaattttaggttcattgtatttgtagataacacagtggaaaccctaaataatggaattgtacccatcaaatgagctggaaccatgaatcaaaagctatggctggaaacagtagaagttggtcttctattttcttctccttctttctccacatccctcgcctgtctctccttcttctttacagcatgtataagtttataaactccatgcagtactgccaaaaaattaaatgagatgaagaaaagtgggagaggtaatattattccatatactcttcagatgaggctcagaattttagcgaggtccaagatcacatacctcctaagtagtatcagtaggggcagaattcaaatcctagctcccactccttttttagttttctttttcttttgagatagagtgtcactttgtcgcccaggctggagtgcagtggtgtgatctcagctcactgcaacctctgcctcccggttcaagtgattctcctgcctcagcctcccgtgtagctgggattacaggcatccaccaatacgccctgctaattttttgtatttttagtagagacggcattttgccatgttggccagggtggtctcgaactcctgacttcaggtgatccaccggccttggactcgcaaagtgctgggattacaggcgtgagccaccgagtccagtctagctcccctcttttgcattcatagtatgctgaagttctctagacatattctttgagaatgacaatggctgctttgctgagcacaagcattcagtgcaataaaatggtggttacggaattaggcacatgcttaatatgttctttcaatcaggcaaccaggcctgggatcaagcaactgcttctaacttgtacttctgctgagtcaaacccatcaaaaaggccaccagagctaaaaataaaggggtcataaaatgtattcaggccacaagatcaagaaccagcactttagatgggctaccgcatgtgctgaaaataatgattcagtgctgaaaatgaaaattttagcgaaaaagggactaaaagaaataatgtaatgtaatcccccacttggatatggagaatgctggacagagagaaattagttggtttgctcaagattacccaattaataattggcaggattggtttcttgtacctggttcggggttctctgtattccatcatagtgttctgatttattataatggcaatgacttacatttgtgaagtaactctttacactctaaaaattctattatattaaaaaaatgtaaggcaaatattatacccatattacagatggggcaactcaggcaaagagaaactagatgatttgtcaaagggcacacaactaatgaatgataaactatgacacaggatttgtcttggaccctttgccaggcttgcagcggggggcacccagtctattcagttctctgggctgcatctggcttgtgctctggcccacagttcctgtagtcatgcaactacacactcagctcctggtgggagggagtttgtgagtgagcaagggtggggttcagctggccgttgcaagccctgacacaggagcaggctccgtgtggggcctgaggccagaccaggcatgttgccctgaggggaacacagttgcactcaggcaggtgtgcctgcaatcctgaagccccagagggagtattacagtgtgctaactagctcttttagttccactgtctgcagcccaatagatggctgcaggaccggcttggccctgcctcttcttccatcatgtggggtggctgcactctaccagcgagggtagaaggccagtcttacagcctttctgggtgcccgtgtttggtgcatcctgagctcttgtcccgcatccaagaagaatgaggtcatgctgacaactgaagggtgttgaggtcggagaattttattgagcaatgaaactgctgtcagcagagaggggatggaaaggccaggttgtctctttcagtgtggctgagtctggggatttttataggtgcaggatgggtgagggagagaccataggtagtattaaaaaggataacatttgattgtttaaaaggcattattcagaaagaaccaattgggaaagggcagacaaacaggaacagaagttctcactctgggtcacaggtttcacccggaaccagcagtccaggctgtttttggcttgaaggtggagtttcaccggggacctgaccctgtctgcctaggcatttgtctgcctcttgctgctctcaacaagagagttaaacctaggtttttgggcttccaatctacttgcctcttagctgttttactcataatacttctgatgccaaatgtgtgggatttttcttctacctccaaacccattctctggttttccttacaccagctatgtgtcctgcaattcaattatgccacaactacctggagttggcagagaccccacaggtcaagactcagtcccacaagactaccccaagttcagacaccaattgcacgttccaagtttctacctgtacttctgaccaacaggctgcaaacagcctgctcccaccacccagttctcatgttccataatttgctagaatgcctctcagaactcaggaaagagctttacttagggtacaacagacacatggtcttctatctcttgatgcttagggcaaggtatggggatgggacatggagcttccatgccctttcttggtgtgccaccctctcaacatctcagcgtgtcaccacataaaaactctccaaatcccccttgtttaggggtttttatggaaggttcattatgtagacatgattgattaaatcattaaccattgaagattgactcagtctccagccagtggcgatcagaggatgggactgaaagtttcaaccctgtaatcacatcagagtctttccggccaccaatccacatcctaaagctatctaggagccctaagctactagatatctcattagcatacaaaggacacttgcttttgcatttttttttttttttgagacagagtctcactctgtcacccaggctggagtgcagtggcgtgatctcggctcactgaaacctctgcctcccaggttcaagcaattctcctgccttagcctcccgaatagcagggactacaggtgtgtgccaccatgccaggctaattttttttgtatttttagtagagacagagtttcaccacgttggccaggctggtcacaaactcctgacctcaggtgatccacccacctcagcctcccaaagtgctgggattacaggtgtgagcaaccacgcctggccacttttgaatttctttagcatagaaaagacgagggttttaggagctgtgtgccaggaaccagggaaaaagatgaaatatctatttattcttttcacactgcctattcctgcacttgccacagggtaggtgtttcactagactgcacaggctctttggctggattcaccagggcacacctgaagctagtggtcctggtttgctgcaagtacagtagcctccctcagcatcctcaatacgttcttggaaactgatttgaagcaaagcaacatatagcaggtccttgaataacatcgtttccttcaaggtctttactttgttatcatgttgatgagaaaaaaaaattgtttggttctttgtcgtgttgcttacgttgtagtttccaagaacctatcaacaacattaagtgaggatttatagtatcgcttctgccatctttctcatggtacttgtttgtcgcaggaagaagtggtggagggtgagctattatccttactcaaaaaaacagcaatcttcccttcccttcccttcccttccaactccattatgctatagatcatgagtttttgttgttgtttactgggactttcccaattccaatttcattgcatttctgtaaagactaacctcatagctagagcaaaggactgacaagtgcttttttttgttttgttttgttttttaagcttactgcgatgggcagatatttgtgtcttaatcctcagaaaatgtgaatatttcatgttatctggcaaaacaaactttgcaaatgtgattgatgaaggtaagggtacagaccttgaggtagaaagggtatcctggattattcaggtgggcctaatctaattgtgagtccttaaaagtggaaaaccctctcagactgtggtcaggttgagagagagagagaaagaaagggagggggagagagagagaggggtagggggaaagggagagagagagagagagagagaaagaaaggggggggagagagagagaggggtagggggaaagggagagagagagagagagagagagaagcaataatggaagcagggttagagaaatgcaactttgctggctttgaagatgcagaaagggactgaaatccaaaaaattcagggagcctctagaagctggagaaagcatggaaatgggttttttttttcctagaacttccagaaagggatgcagacttgctgatgccttggttttagactggtgaaacctatgttggactttgaacctacagaactgtaagataatacattggtcttgttttgagtcactatatttgtgttttatttttattttttgctgctatagcatgttacagcttctcctcagagacagggtgggcccctactgaaaatttggttcagatgtcaagcctgatgatgatgcctccactatacacatgtgccaacagggtattaaaaggtttcttacttacataataagtctttcagtatggcttccacgcaggtccagaaatggcttgaaaaagcagagaaaggagactggcttgggaatattgtggtagttaggtggtagggaaggagtgaaggttcccatgcgtggtttgatagttccattggctccaaaggagagagcacccaagctttcttagcagcttgccaaggtgtggggcagtaaaggaataaggtggagtgaggcttaaataatgtcaatagtcaaacagcaagaaatggagtcaaactccattatacggcaagaagagaaaactggtacactaatcttcctctagctccatctatgcagcctgtgaatccgcccattcatccacctgtattctattatgtatccactgcatgccaggtatagttctagagattatggatgtagcgatgtccgtgaaataatattttttcctgttgtactcacagtctagtagaagtgaacactaaattgactcataattatttgattatttgctgaggatcacaattgtggtatattgaggaccataagagaccacaatggagagagagacttttcttcatactaattttaggagaattttccctggaaaggtgagagttggcacagttgaactagcagttcaacacacagtggtagagatgaaagaattctaggcaaaagagaaaagcatagacaaaggcataaatgcatcaagttatgtctgtgttgctgtaaatgggattaacaaatgaggattttttttttcaccctctgatttcctgtgggcttgggattggggaatgaagattagggaggtggtttggaaggaaaagctggaatagtaagggacagtgaggttaaagatgaccaactgttggtaacctgcactttgacctaatgtaaggatgtgagtttgtttttagtctaaagccattgcctcatacccagtttaatatacttgaagaaaaacatgtgagatctataaagtagacaagattggaaagaaattgtttcaagaaaaggaagttaatcagtaactgagtctaactggtatagactacagtttcttttccaataatggcccaaggaaatgatgcacaaaatatgtcgaattatgattgcttattgaagagggagtttgctttgcggggtggactagggggtttggcgaaggaataaagatgctcatcatgactcagaatgtgtcctctctcccttggatcctcctctcggtgacaccctagaacatcctgggacatcactggttttttgtttttttgttttttttttttgagacaaagtctcgctcttgtcccccaggctggagtgcaatggcatgatctcggctcactgcaacctctgcctcccaggttcaaatgattctcctgcctcagcctcctgagtagctgggattacaggcacctgccaccatgcccgactaatttttgtatttttagcagagacagggtttcaccatgttggccaaactggtcttgaactcctgacctcaggtgatctgcctgccttggcctcccaaagtgctgggaatacaggcgtgagccaccacgcctggccatcattgttggtctttaaactccattcctccccagagggctggtaccttggtagtagcctccaccctcatgtgggtatcagctggggctgtctggatttgtataagaattccagtgttaatgatggagttctgttggaaatagggacaagtgttctttcaagttctcattcccacctggtgctgcgttctcccttctctctccctctgtgttgtattttagattcagggggatctttcacatacataacaagttcttgctttggacttaaaaataaacactatgaaaaaagaaatgcgtgttccaatctgacttgaaatgcccaaatatgattagtattagactgtgaaataccactgtttatctctaggagccagctgctgggagcattttgagggatcaggctggttgttgtggatgacgttttttttaaacaaaacatgagccccaaatgtctgtacatggagagtgtacagactctccatgaagtcccctttgtcgaaaactctgtctttctaatttttattctcccctcatttgtcccgatcacaatcatggaagacagtgtgggagccaaataggttccagtttcaatctgaacatttccctctgacttctctctgtatttcagcctttctcttttctaaacttgcctgactgcatctagggactttccaactgaagaaacaaattatttgggtcacacaggccaccactgctatttatgagccaaaaaaatgccgcttggcatttggaaaactgatttattaatacacgcagggtcttgcatgtcaacaactgcaaattatggataacagatttgcatcttctatcatttcatgacctcattcaaaaggacttaatgagctaacaaaaagggctaaataatgaaatgttttttttctctcaaagctctttttgacctacctgcctacctcttccctcaaaaagtaagaagaaggaaagaaaacaaaaatattaatttactgaaaagcttaactttaaagcattatgagattttaaatccgtgaattactctgtatgatatatgaatcaattacagaaagaacaggaaatagtaacaggtttgcatcaatcttcagctaaactatgctcagggaaatgaagctagaattcaatcaaacaaggagctaacattaaattccttctgaacacactactctggaagaatatttgagggacactgaaagtgaaaaataaggtatatttgtctttggtgaatgtgcactgtatttgaagagacaagatattaaaagtcgtgtattgacattgaaaacttccttaacaatttactcccaagagaggtgaagcagcagagggtcattacttggcaaataagcaaaaaggatattaattaccactaactggaggcattactgtgggatcgtaggggtctatattagtccattttgtgttactgtaaaggaatacctgaggctggataatttataaagaagagagttttaattggctcatggttctgcaggctgtacacaaagtatagtgcctgtatctggtgagggcttcagaaagcttccaatcatggcagaaggtgaagaggagccagcctgtcacatggcaagagagagggcaagacagagaagggagacgtcccaggctcttttaaacaaccagatcttgtgtgaactaagtgagcaagaactgactcatcaccaagggaattgtgctaagccattcatgagggatccacccgcatcatctaacacttccagtaggccccatttctaacagtggaagtcacatttcaacatgagatttggaggggacaaatatccaaagtatgtcagggtctgagaggatttatttctcccacccacccccctccactcccctcttttttggagacagcatctggctctgttgcccaggctggagtgcagtggcatggtcgtggctcacagcagcctcagcctcaacctcctaggctcaagtgattctcccacctcagcctcccagtcctcagcctcctgggactacgggtgcataccaccatgcccagctgcttaaaaaaaatttttttaagagatgaggtctccctatgcttcccaggctggtttcaaacttctggactcaagcaatcctcatgcttcagcctcccaaagtgctggaattacaaacatgagcttctgctcctggcccctgagaggatttcaagtaagagatatatttttttttctggatttcaaatataatcaggatcctggtaagttggaaaagcaagaagagcatctcacaagagaggggatgaaaagaggacttgcagaaggatgttctgtgggtgctcagggttttgtgtacagaggttgtttgttagtttggagaattaatggagagttgtcattcaaaagagcatcaaaaacatcaaatgcctaggaaatgccaatgaaagatactcgagactcctacacagaagactacacacagttactgatgataaatggaaggaaatgccaagtttatggactgaaagagtcaaagttgttatatcttgttttcttgaaattcatatatatttaatccaataccagtcacatcccagcagattttatagttgtggaaattgacaagctgattctacaatacatatggggccgggcgtgagtggccaaggtgggtggatcacttgaggccaggagtttgagaccagcctgggcaacacgacaaaactccatctgtactaaaaagacaaaaattagccagatgtagaggtgcatgcctgtaatcccagttacttgagaggctgaggcagagaattgcttgaacctgggaggcggaggctgcaatgagctgagatcataccactgcactccagcttgggtgacagagactccatctcaataaatacataaataaataaataaataaaatttatatggaaataaacagagctaagaatagccaacgtcaaagatgagtaagatgtactaaactttaagatgtatttaaaactatagtacctaaggctatgggttactaatatgatcaatggatcatattagatgtactactaaaaccatagtaattaagcctgtaggttattaatatgaccaatggagtagagagtccagaaacagattcacacatatttggtcacctgatttatgacagagttgccagttgcgttactgctgacagtgtaaattggtgcacccactttgagaaacatatgaatcttctgagacacagcagttccatatttcagtatattaacagaaatgtgtatgtgtgtaccaaaagacatatccatgggtgcctataacatcactgtttcttataaccccaccccccattaccattggaaacaacctaaatgtctatcaacaactaaatgactaataaactaataaattataattcattcacaccatggaagactacatagtaggtttggtaaactttttctgtaaaagatcagatggtaaatcttttagactttgcaggccattcagtctctgtcacaacaactcatctctgcttttgaagaatgaaagcagccacagaggatacataagtgaacacggctgtgcttctagaactttatctatggatattgaaatttgaattccatacaatccactttagaaaatattctttttctttgtttttttttgactattaaaaaatataaaaactgttattagcttgcaggttgcacaaaaacctgcagtgagacgtacatgaagaaggaccagcaactgctacacactccacaacatggataaaccttacagatttaatggtgaatagaagaaaaacagactgaaagcagcatacacgttataatcccacttacataaagttcaaaaacaggcaaaactaacttatggtgatgaaggtcaaaagaatgattacctttggagaggtaattatacagcaggcttctgcaccgtggctgatgctctattttgtgatctaggtggtagctaatcaggtgagttctctatctaaaaggtcacccatctatactgtgaatttgcaatagaacaatgttttttatttgtttatttgttttaaataatctaggagcaatttaagagaccatatcatgccatgtctgagagtgtagattctgtacacagactgctaaatcctagttttatcattagctgtgtgaccttgggcaagtcgtttcacctctctgttcttcggtttttctcaactgtaaaaaagtgatactcagttgactcagtagtactcgacacttgtagtattgctgtaagaatgatgagttaatccatataaagtcacttaggacaatgctggcatgccctaagaactcaatagatgttaggtattattactgtggccaataacttttttgctttaggtcttaagctccagtttgttaagacatttataaactcttgattctgccacaaacatacttttagattaagcaaggccaggagcacaaagaagccttttttaactcgcatgcggtccagcccagctcaccaggaatctgattctgaagagtctgggaataaaggctcagagtcataaataatataaatatcccttgtcttatttagaatgtacatattgcctgtgaatagttgcagtgtcagtaggtgttagctgaagactctgagatctgggattccaaacaaatatacacttccattctgaactaatcatttttatagaaaacagatgaggcttgttcagtaggtgcatgaacaacatcttatgctgctcgcctgttctccaggccgaggttctgcatccagaaagtgccagagacaggatatcttgacctccaggaattttataaggtaaatcctgctcatccacctaaaatattttcctggaaaaaaagccataaataaataaagtctgaaataataatctaattcctaccctttatgccctttttatttatttttatttatttttttgagatggagtctcgctctgtggccaggctggagtgcagtggcgcagtctcagctcactgcaacctctgcctcctgggttcgagcaattctcctgcctcagcctcccaagtagctgggaatacaggtgcatgccaccacacccggctaatttttgtatttttagtagagatggggtttcaccatgttagccaggctggtcttgaactcctgaccttgtgatctacccgcctcggcctcccaaagtgctgggattacaggcgtgagccaccgcacctggcccctttatgctctttaaatgattactataccatcctgggagacatcatattccatgacttaaaacaatgaagcaaacatgccaggcgcagtggctcaggcctgtaatcccagcattttggaaggccaaggaagacggattgcttgaactcaggggttcatgaccagcctgagcaacaaagtgagacttcatctctacaaaacacacacacacacacacacacacacatacaaattagccagacatggtggcatgcacctgtagtccaagctactcggaagactgaggtgggaagatcactttaacctgggaggcggaggttgcagtgagccgagatcatgccactgcactgcagcctgggcgctaaagccacaccctgtctcaaaaaaaagaatttttttaaaatgaagcaaatagcatttttaccaactacaaatatccattcatctgttcaatcatttgacaaattttattgagtgcttaatatatgctgtataaaaggcaaaggaagttcctgagtaaaataattttttgactgtattctttgtttatggtgatgtttctttaacatttatgaccatggtatgctacgatctcttcctgttcttcttttttttgtcttttctattaatacccattcatatcacagaatacactttgggaaatgctgagttaactaatcttttattgctgaataccaaggtttcctaactctttgctgtcataaataacactgcaacgaacatttttgtacctacagctttgcacacatgttggattatctttttaggatatatttctaagagtggaattgttgagttaaaggctctgtgtctttttatgtgcataaaagaccctatgtcagttttacaaatcttagggaatcacagactcgtaaaatatcagagttggaagggatcttagatagcatcaactcaagcgctcctgtcaccgtgggaagactagagcttgaagccaggtcagtcttaaggcacttctcacagctccacgtgggctcctggggcagctgtccagcagaagaaagacattagagggaagtcagtgaggtatcaccagtgttagcattcgcctcttctggctcagactactcttccctttttttcctcagggtctgttttaagccatggtgtcatatttatgagccacggggtatttaccaagaagaaaatgtcaggaaaacaaagatccaatctagcaccctttcttcctcttgaaaaacagacaagaaaccaggtagtttgcaaagggcacaggttttgtgtgtgtgcatgtgtgtgcacatgtgcactctcctgtagtaattgctttgggaagcttgggataagacgcacacactacaccatgtgatattgatttctcttcagcacagctatgaccctgaggcttatactgccttaagagagggctaggctggggattgtgtgaattatttcctagtctcgcccgctgtttccagtagaattagctgccatgtggtgagcgcatgtttttgaaagattcttggtaggaggtagcatgcggctcaggtcaactgatttgagcagccttctaggcaggggagcagagccgtgagtgactaaacccaaaccagacccagaagctggggcactggccaaccccgcctccagatagggacgaaggtgcattccctggcgtctcccttggcgtcccccttggttgtatttgatttgaacagaatccagctctcctcaaaatgaaaaaggagtggcagcttccaagttgcctctaactttaatttggggaagaataacatcttttctctgttgtacagacacacatcaccacatcagagcaaatgcccccaaagctccattctgatttctggcttggaaaagttcttgatgtttcacggaaaaccttcccacatcctaccacacccatcttgttcttccacccacctcaggcatcttctgcctcattactgaggtattattaatggaacgggaaattggcaaagaaattcttgtcaatggctggccagagccgcccacccaatgccatctgcccagcctcaagccatcctggtttgtgtggctcaggagattccaactcagattggaggtgatgccagggagggccctgttgggatactttgttcgggcacaagagccctccttggtttaccttggagtaattaagccctgataatgcttgagacagagattgtgtaagcatctctttccatggcttctatcacatccctgggcacatatcagagattcaacaaacatttgttgaataaatgagcagatggcttgggacttgtcttgctttcagatatatagtctttcttggtctattgttgtggttacacacgtgtctgtgtttactttaacttccagccatgttcaccatttgaggatttcatggggaggcaggacaggggataagatgccgtcttcaatgttagaaaaatcccttttcttctttgtggagtctcttccccgcctccacctgttgcctgcggtgatgctctcggacttactaaaagtgaaagactaatgccagacctgatttcaggcagacatatatttcaggctgagttacacctgggccttttgggaagcatagacagacagaaagaagaggaaaggtcaagtccaggtaatggagtaaaatttgggcctggttccaacattcaaggcttccatgtatccatgggcagtttggatatttcatatgtgccagcagaggggatctgttggcactcatattcagcctacatacactattcttgacactacacactctgtcacaggtcgtgtccacaaggaggaagaagcatcgtttttgtagcacaaggacagtaaccaatcacgaagctgggcatctgctcattggggatagtatgtctttctctaatttgcacaaagtcttcatatatggcaatgtggcctgaaaactcaattccatattttatgtttctccattcttttttgaatgtcctggatttgtgaacagtgagtgtgtgtgtacatatgtgtgtgtgggtgtgtgagagagagagagaaagggagagtgtgtgtctttgtgtatgctctcaatgtggctataagggctgaattgagtagtggtattaaaactagtgcaggctcggaacagtggcttatgtttgtaatcccagcactttgggaggccgaggcaggaggcttgcttgaggccaggagttcaagaccagcctgggcaacatagtgagtctctgtctctaaaaagtaaaaattaaagcaattagccagggtggtagtgtgtgccagtagtgacacttgggaggctgagatgggaggatcacttgagcccaggaggttgaggctgcagagagctatgatggtgccactgcactcaagcctgggcaacagatcaagaccctgtatctaaaaaaaccaaatacataaaaataaaactagtgtacttgtatttataccaaaatgccttctccttttctcctgatagttgagtagagaaacgagctttctgagtgaatcccttctttcattttctaggcctagtgtggtagacaggcatgtaaccactgcttggccaattaaacccttcccctcccatctccgtttctctgactttgcatggaaaggagggaggcataataatgtgacctgcagtgtcttccccattttgaggtatgggctgggaagggaaattgggaaggttagaaatgctccgggtgaattcaccttctccttcaaattggccacatcacctcccgtgacttcctgaccttcctctcccagtttctaggaagtcttcttattgctccttataaattgactactaaagcatgggtggctctaagtactagacatagcccataaatctaaagccaaggagacctcccactagtagttcccacggtcatccccagtcctcaacttcctcatctctaaaatagaagtgcccattgatatggccctaggatataagatgggcctgggagaacctgtgtctagtctacagagttcctgggctcccgaggcacctaacatcacaggcattgtgccaggaaagccttttgatgtcctcctggctctgttcttttcttgttttataagctatacatcatcaaagactcagcacttgttccttttagacatcacaactcacccttttcgctcctatccagatcccccttttcctccttaactcttccttaatttatagacttccatgtaaagagagctacaaacaaactgacatttctgaatgatggcacattctttaaatcaaaattcaggctcacagcagtatcacatgagcaaaggataattctcccctcacggcacgggccaggcttcagaggagattcagtttgcaatgtggaatccagcttgatcctcattttacctcctcggcctcccacataatgtaaaagcaacatcagtttttttctcgagttggaacaaaagtctcttagatttgctctctttacttaatcatctttaggtatgtatgaaattggtaagtgaatgacaaaaacaaaaacaggttggtgaggttgagagttcatggttctttacctaatgtccagaaaggcactgccccgagacactctgatgtgtgtgtgtgtgtgtgcatgcgtgtgcgtgtgtgcacacagtagtatattcagaaacgtttctttcctcctaatactcagtgactaggaagaacaaattgagagctccatacattaaaaagaaactttagaacacagatgtcaaagaagagtagtttgagacaaaggcataaatatgaaatgtcttacatgctttgtaattgaaagaaagataaaatgatgtttaataggaatgacagagtcacaaataatttagtaataaattatagtcatataaagaaggaggaggagggatgggttgaagggagtcagaaaccagaagaaatgttacggaaggatgggggtagcagaggggaggtagagagtatgtcttagtctgttttgtgttgctataaaggaatacctgagaatgggtaatgcataaagaaaagaggtttatttggctcacagttctgcaggctgtacaggaagcagagcgccagcatctgcttctggggaaggcctcagcatgcttccattcatgtgaaaggggagcaggcgtcacatagtgggagaggaggaaagagagagaggaagaggtgccaggctctttttaacaattggatctcaggggaactaatagggtgagaactcactcattaccacgaggacggtaccaaaccgttcatgaggaatccgtcctctgacccaaacatctcccatcaggccccacctccaacactgggaatcacattttaacatgagatttggaggggacaaatatccaaactacatcagactgtgaaaagagaaagaggaagatggaaagagacagacaacaaagataacaaagacccaagacacaaagacccattcaatttttctattgatagtttttgagcagagctcaaaatgatttttccaccagagttctacattgtgccagacccttccccacgtgttactttcactgcctctccccacaaagccagcatagatggataatggaacttgactatggatggagcaaagcaggaagctgaggtctgcaaaggtagaaaggagagcaatactaggtgtacccggtaggaaggtgctgtgtgagggaaggagggtttctcagcaccataacccatgtggctgaaggtgctctgggctgcccaggcagatgtgcaccctcgaccggcaaccttgcaagggttaagtcctacaggttgcgcctctggctaaacaattttccactgctgtgatgaaatttcaagtgactgctgggtagctggaggtttagagaaagctgggctgaagatgaagtcatttttatgagaatcacttattttttcttaattattataaatgcatacaccatgatacctcacttcccacaaccaaaatttggtaagcctgggaaggacccaggaatataaatttttgaggcaccctgtaagtgattctttttttttttttatggagacttctgtcacccaggttggagtgcagtggcacgattgcagcctcaacctcctgggctcaagtgctcctcccacctcagcctcctaagtaggtaggaccacaggggcataccaccatgcacagctatattttgtagagaggtggttttgccgtgttgcccaggctggtcttgaaatcctgagctaaagcaatccacctgcctcggcctcccaaagttctggggttacaggtgtgagccacaacccctggccccaactaattctgatgcaggaaatcctaggctgaaactgaaggcccccattcattgcatgtttcaagcccagcttctgcttttaggttccatgatcgcagaaacattagactctgaaaaaagtcacaagaggggttggaaggtgttaggaaatgatgagtgtcattgataactttaaggccattacttcctctagatttatttgctttctttgtgtagtagactgttaatgaccctcccatagattttgaccaactctggaaaaaaatcaaaaaactttcttctgcatcgtaggtgtgtatttcctgtatactctaaaatacaccctccctaaaaccctgtttctgcctgagtgtttttacctggcctctagggtattctcagtcggtgctggagcttgccagaagcaccagagagttatccctaggatggactctcatgcagagataaatgggagttggtggataaataccccagcttccttgcctcctgaagagacaattctgaagcatcttctattcggtctataaaaagtcccagctgcccacgcaggaagtcactcaatcatgtaaacaacttacacccaaatcattgtcctagaatctacctggggggaaccaaaactaatactttctaaaaaaaatttttaaatgctccttgtagccttgcatacattttcaaatacagctgtaggggaggagaaacagcttttcctcacccatccctaggttcacaagagaaaagcatacacatttatttaatataagttttatgtgacatgggagccttcataagcaaatgaaaacccaaagaaacagttaaacttgtgtatttttatacaaagtttggtgaagagcgggtagttgtgaagaactataattggacaaagggggtctgatctaagggtaataaactgggggaaactcagcaaggtctgtgtgttcagcttcctttctttgattctgtgtcttcaaagacaagaaagttcctttcctctgggtacaggaagggcacctccggaatgagaatcctatgacccgcttcaggaaagaagagttagggggtgggaaatcagagggaatttcctgattctgctgttttctcaaatgccaacatgccatattttggggtagcatgtcctgaaccccatcatggccaagatgtgtgtcagcaaaaacagtcagggcataataaaaatttgcttaaccataagttagaaaaacaaacaaacaaacaaagagaaatttagtaacaacactgcaaactccctagctgctgtacatatttccttgtcatcttagaattcagataactgctcaaccaaaattgcacctaagagaccaaaaagatttctttattaaaacgcctcatttacatctcattaaagtttgatcaaggggtacactattatttgaacttgacattgccttggcctgtaggtgaccagtggtgctcccacaattttcagtacctgagctcctccaactccgtaatcaactggtgcagagcttcacacagccacgagattacattgtcaccccatggcgttcccttgcatttgaaatgggctttatagagcttccatatatgttatcttgcttgtgctaaataaccatcttgtggagcagtcagggcacgctgctctattctctattctgtggaaatagagggttagagaaggcaaatagtttgaccaaagtcaaaatgaggaagtgtccattattcattcattcatttgctgggcagttagttcaagctaaacagcctttcctaagcctgcagaaagaatgctctatgcaaaattgttttctagacatttttcttttttgcattctattaaatggtggatactttttattaaacagattcaccccatgaagtcataggtcttcaaaaccctatctacaaattgtagagaagtaaatcacctctgcctcttcttccctattgtcagtttgtcagtagcagaattccagagatggtgagcaaccaggatgatccccaggttctttgccacttccaacaggcaagaccaaccctcagccctcctcctgccccctccccgtgcctgctggtgcccatttttttgagccctcaggtcttgtgggagccttgctctccaggccactctgtaggaacactcactcattccgaccactcccagcctccttcacccttccaacaatgagcgtttatagctgcagcactgcagctgggagccataaggcacgaatgaacgtgtgtccatagtttggagccgatttttgtcaggaatgtactaaacacttcataaattaagtccttggcgatcaagctacctcgatatcagattagtcatcgctaaccattccctgcacaaaacccaggggacagatacaccggatggtgccaggatttttctttttctttcttgttctttttaatagaaaatgtgtgcagaggaatgagccacccatcctgcactgcacaatacagatgtgtgtgatacacattccccctggttttcacagctctccagccttactgtccttttctcaacatatcctgtgtgcagaatggcttttggcagagtgggagaggctggcaaagaccctgcctgccttggactctccgcaggctttggctatgccaggaactgttgtcaagactgtgtacgcttagaggaattcagtccttactacagtcttatgagggacttactgatactgtcctcatttgacagctgaggaagctcaaggacttgagtaacttatccaaggctgtgtaactagttcatggcagagcaaggattcattccacctgccagggcccccagccacccactgcagtacctctgctcaggtacctcgacccatagtcagagctactctgcaggcacaacagggcaggagatgttggggtaggggtgctaatctcagtcccgtaatgccttcttattcatttattgatgcaataaacataggtactcaggacctagcagcagtttctgctactttattaaattatattgaaatatataattactttactccaatatataagtaatgcaaagtaactcaaatatatattccaataaacaaagtaattcaaggcacagcttccctcattgaacagaaggtgggctacaaaaggccaaatcccccatctctagaggtggctctgaggcactcttcaaacaaggtcactatgagacataaattgatatttttccatgtatatttaggaggcataggtattgcataggggtaagggtggagcagggtgacaatggcaccagttgttgtgttttcttcaattttctggaaccactgagctctgaacacaaattcacatgattcttgatgcatcggagttacttaaatgacaggaaaggttaaaaacgaagtgtgccgtgcaggaccatggaacatttctgtatcccatgtaaaccacgggtgcaatgggaatagttcaaagaaaatagatgttagtaactcacgtacactgtgttcctctgcagggattccctaggaaaagcacagttatagctatgcacagcttattgacagctgttcttaagagtaataacattgaattccctagtatgcttttgcctgcaaatgagaagaacataacttaaactagcttagacagaaaggaaatttattgactttcacaagcagggagcagcaattgatctggctggagcacagtgaagactaaaggtgttgtcatcctctttcctctctttctttctctctttcctgtctctgcttcctaatacatactgatcaatttctcccatcctgcaggtggataacctgcgtatgcatcctgggttagggggctgccatcagctccagctgcccattttcccaatacctagatttcaaagccaagaataactttcttgctagctccagcggagaagtcttgggacctggttggcttggattgagtcacatgcccagctctgaaataatctccagagtcacttgttctctgactagcttaggtcacatgcttgcctttgggagagggcagtgggtaccaagattttcatcctgctgggagcacagtaggaaagggattgtttctcagaggaaaggaaggaaagccatatattcactacaaattactattattattatttgagatggaatttcgctcttttacccaggctggagtgaagtggtgtgatcttggctcactgcaacctctgtctcctagagttcaagtgcttctcctgcctcagcctccagagtagctgggattataagcacctgccatcatacctggctactttttttgtttttagtagagatggggtttcacagtgttggccaggctgttttggaattcctaacctcaggtgatccaactgcctcagcctcccaaagtgctgggattacaggcgtgaggcaccacacccagtctacaaatttttttttattttttggggacacggtctcgctctgtcaggctggagtgcagttgcacgatcacggttcactgtagcctcagcattcccaggttcaggtgatcctcccacctcagcttcccgagtagctgggactacacatgtgcaccactgtgctcagctcagttttgtatttttttttttttttttttttgtagagatgaggtttcactctgttacccaggctggtctcaaacttctgggcccaagcaatgccccccgcctcggcctcccaaagtgctgagattgcaggcatgaacctccgcgcctggctactacaaattatttataaacattccgtgactagagtgaccaagagcctgagttctctcattatttgatttattactcatttgtaaaatctctgaggttatatactaggggccaggctgtgtctgtgttttggtgtccaaattagtctccttgggctgctgtaacaaagtgccacacactagccagcttaaacaacagacattgtctcacagttctgaagttcagaagttcaagatcaagtcagggttggttccttctgaggactgtgagggaggatctcttccatgcttctctcctgggccaatcattggcagccctttggttgtagaatcatcaccaggttttctgctttcatctccatgtggtgctctccccttgcacatgactgtttccaaatttgcccttttttttttgttgttgagatggagtcttaccctgttgcccaggctggagtggtgcaatggcgcaatcttggctcactgcaacttccatctcccaggttcaaatgattctcctgcctcagccttgagagtagctgggattacaggcacctgccaccatgcccagctaagtttttttgtattatttttattagagagggggttttaccatgttggccaggctggtcttgaattcctgacctcgtgatccgcccgcctcagcctcccaaagtgttgggattacaggggtggaccaccgcgcctggcccaaatttgaccttttcatagggacatgagtcatgttggactagggcccaccccaactacctcctttgaattttagtacctctatgaagaccctatcttcaaataaggttacattttgaagtactgggagctaggacataaacatataaatttttgggggaagaggggctcaattcatcccacaagggtattgtaatcataggagaggtaagctggctaaggagggggcaggatgaggcttaggatgaaattctccagctctttacttcccggaagatactccctctcccattacaaaaattcacggtattcctaaacttttactgagaaggaatcctggtccaggtattattttagtcaatgagcctttgagcaacagaaaagaaaatgtttaaatctagatttcaactactttctttactagggataaaactgatctaaagtttcaccttaaatttgaccatctcatcttaaatagtttcggtggctttctattgtctaaagatttagatctaatagatctggaaggaaagcccaggaagctgagtcacaaatagaccttagttagataattctgatacaggccacgctttgaaaaatgctggcccatgggataagaattacactcataagtatattacacaaagttctctgtgatctgtgtcttgcttcccttttctgtcttttcttccatgacccctctgactcctcaacaaacattgctctttagaaactccttggccaggtatggtggctcacgcctgtaatcccagcactttgggaggctgaggcaggcagatcacctgaggtcgggagttcaacaccagcctgaacaacatggagaaactctgtctctactaaaaatacaaaattagccaagcttggtggtgcatgcctgtaatctgagctactcgggaggctgaggcaggagtatcacttgaacccgggaggcggaggttgtggtgggccgagatcaagccattgcacttcagtctgggcaacaagagtgaaactctgtctcaaaaaaaaccccaaaaaaaacccaaaaaaaagtgggggggctgcaaattaaactaacagaaaaaattaacaagagaaaagagacacagttttatgtccacaagagttcacaggaaagaaatggaactcaaaatagtggttagatttgggggctcatatgccctttcaagaggtatataagagggttttggtatgaaacagagcttgggctaaaaaggatgacacattgtagggaagtgtctagaaaatatatcagggactaaaggaagacaagggctattctagtaagatccatttataccaacttatcttggtgttaattccctgtcttgaataagaagagccactcttctctctctggtaaaggaggattaccttcctcaaggggagatatgtcctacttttcgcatataaggggagggcaggaaactctttctgcatctattgattcttagttatcttcaggttaaaataattcatatgccaaaataacatattttggggtggcatattcaattctaatcaggaagatggataaaaatgtcaagtaaaacaaataattacaaattttggcaagtcttgcaaatgaaacaactacaatatgggaaataggtggagaacaaagcaagagacacagtttggatatggtggtcttggaaggcctccccgagaaggcgacatttacactgagacctgaaagaggagaaggagcatcagtgatcaatgagggaagagatctttatgcagagaaagcaacatgggaaaaggccttgaggtgtgagagactgaaatacagactgcactggttgcggtggctcatacctgtaatcccagcactttgggaggccgaggcaggtggatcacctgaggtcgcgagttcgagaccagcctgaccaaaatggagaaaccctgtctctactaaaaatacaaaactagtgggagtggtggcgcatgtctgtaatctgagctactcaggaggctgaggcaggagaatcgcttgaacccgggaggcagaggttgcagtgagtcgagattgcgccattgcgcttcagcctgggtgacaagagcaaaactctgtctcaaaaagaaaaaaaagaaatacagactagccatggccagaccacatagaaaaatagaactctgatctacaatctgcagcaacctgcccaagaaaccatttcattaaccagcccagaaagccatgcaactttctgtaagtcagatttataggaagtcagaccactcacaattgttaacaatcagagaagccaagcaaaatccatatgacaattggcttaaaatggacaggaatacatgaggggactaaatgaagataaacggcagtttacctaagttttgttcctgtttctaaattaggaccactctgccgggcacggtggctcacacctataataccagcaatttgggaggccgaggtgggtggatcacttgaagtcaggagtctgagaccagcctggccaacatggtgaaaccctgtctctactaaaaatacaaaaaattagccgggtgtggtggtgcatgcctgtaatcccagctacttaggaggctgaggcaggagaatcacttgaacccaggaggcagcggttgcagtaagccaagattgcaccactgcactctagtctgggtgacagagtgagaccctgtcttgagcgataaataaataaataaataaataaataaataaataaataaggaccaatcaaagaaggctaagcatgttcccctaaccaatcataggatgccccacttttagcctacctgcagcttccttacgccaactgcctccaatcagggcacacgtgaagctttccctttttccattgtaaaactgtcccactcttcttcctgtctctgagtctctgtcaaaatacaagtgatgatggctaactcccttctagcaagctttaagcagctagcctttgcttgctgtcatttggttggtcttcatttatttccacaggtgaaaaggagaaataagaaatccaggcattgagaaagcacagggactgagcctagtgggctgtagagagtgggatgggatgtggctggacagagtggggtggggtgcagctggagagagtgaatgagtggaagccaggtgagggagggccattagtaggggctaaaagtttattctaaatgcaatgggaagtgctatggtctgaatgtcaatgttccccctcaaattcatatgttgatacttaatttccaatgcaagagtagtgagagataaggcctcgggaaggttatgccctcatgaatggaataagggcccttatgaaagaggcccatggaggcttgtttgccccttctgctgcgtaagggcacgtagaagttgccatctaagagaaagtggtccctcaccagacaccgaatgtgccggtgtcttgatcttagacttcctaggctccagaaccatgagtagtaaatttctgttgtttacaaattacctaatctaaggtgtttcattacagcatcctgaacaaacttaagccattgaagagttttaagcagataatatgccactctgatttacattttaagatcactcttgctccggagcaaagatggaaagggtcaaagatggaaccaggaagatctgtcttgggccaggagggcagtggaggtcgagacagatgggtagatttaagatagatttttggttcaggcagagtgtggtgtcatttacagagatggatatgatcgatggttgatggacaattagttattgatgggaaagaggagacatttaattttgtgatacatcaaagtacagatgacaagtaagtagtcagatattaaagtctggaactcagaggactaatctgaaatgaaaaatatattttgacattatcagcacatggataattttaaccatgagaattgatgaaatcttctaaggaaagaaatggaaaggagatgggcccatccatctggtgattttacagaggaggaagaaccaactagactgagaggtaggaggaaaagcaaggataatatgggacaaagaagcaaagagggacaagagtgattcactgtcatgaatgtttctgagagggcaagatgagacagggaaagatctgtccattgccatttgccaaatagaagtcattgtcaactttgtcgagtggtttttggagtgacagagatgcaagctggatggaagggggcataagaatagaagtgagaaagtggagaaagcatggctaaccctcttgcaaggtcagctgagaaggaaagtagcaaaacatggcagagtgggagaccagaatatgcctcccccaaatataaagaattgttgagctgaagacagttaagaataagcagatgcaggaaagctctctgcccgccctccatttgcctaaaagcagggcatagatttggaaagacaaaaggtaacctggcccctctctaccagggagaacaaagcttaaccactgaagacacctttaaatgtttatcagcctggagatggtaccagagaaatctacattaacaagcttcactggctagcccttatctgccattttttttgcttttttgctgctagtagagactcaaagtcctttttctttgtcttgtcacttctctaaaaatttactattctttgagggtgctgtataggctggaattcaaagccacctctttgagaactactcattctctaggtgtcttccatgtataaataaaatgtacacatgcctaaacttctgatttttttttctcattgatcggtcattggtaacccggatcaattccaactaagaacctctgggagttattgtcttttctctacagcagaagatggtgggattatctttttttttttcttaaaagaggagctgcactaagcttccatgcagatggaaatgatccaaatattcatggtatgtttgcttttttaaaaatgtctaatttatttatataattgtaaagcaatattcaatatgttttgttttgcttttagaggtaatgaaataaaaaaattcagaaagcttcaatgatgtccgtaaggccacatggcgtggggagtcagtgactggatcatggcattacccacgtggcctccaagaataaggtcttcttcaacctgccctgccccactttcctgatactgattaaaacccgagaaaccattattaagtggccatatgccaagaactttgcaaaatcagagcagagtatgatcagaaaatatttaaacccagagcagaaaacatttaaacccgctacaaagatacgcttcagagagaaaaaaaaaagacaaattgtgaaattagccaaggagcaaaaggattccttaatccaccaaccaagttcaccaacagttaagtgataactccttcccctcccctgcatcctgtattccccaaacagggccttatgaatggagggtggggaatcttaaacgttaacttttctgcacttttattttggcttcatttgtagatttcacactttctctgcttccttcctccagggtgtttttaattattggagatgagagccaggtgaggaagcagggcttggggctgggtagtagagggttcacctaaaggagggctttgttggggatccattgacaccacaggttcctgcaagccctgcctaggacagcagatcatttgtgggtgaatgagggagcaccccttgaagcctctgggcttcgttttccatgccttgtttttcctcagaaagttatccccacaaccccaaccccaaacagcacaagtgagcagacttttgtttcaaactcctctaagaattctcaggaaagtgtctccattctcccacctgaattatcacctttttttctcagaaggttctgtgctgagggtaaattgtcaggaggtctaagttagccatggctgtgttagcttagccgtctttactatccatggccactgtcctagcctcgccaggcttctcttggcaagtctgtggctttgagtctatgagtccacagcactgagcctggttctacttcttactgggtctgtgatcttggtgcttctgaatctctctaagactcagtttcctcaaaaggagaggcactgtgatagctgtactcgccttacaagttatatatatatatattgagcacctactctgtcaggcatgctgtaaacgtgcactagaatcctcataacaatcctaaaggcaggattctaacgtcatcaacaaggaaaaacattctattttctccagggaggcaatgcttttcctaaaaagttgagaatttagacctggacttggctgagctgttttactgatttttgcaagagcaagagtaaggtgacccatgcagggaaaatcatcctagactaaacttctaaaaccatacgtgttgcctatcggttataacccaggtggggcatcttttctgctgcgacatgtgtacccgtcagccaacgtgtgatgagctctcacgttcagaccttggtctgtcagctgtcaccactcccttatctcatgctggaaaggcacaccaaaatacaggcgagtgaaagccatatttatgcggggaaaacttgggatttgccctaattttcaaaaagagtgaatttgaaacttaggcatttaaattaattattgtgtaatatattacacgtgttggattagcttctcgttaaagctgtgtgtggtgttggaaggttcttcagtgttttaagcaggatctgcaggaaacagcaccacgtataagacgagatctttctcttgcaagacgagatctttctcatgctctgagaaaaccggaagtttctttgggcaggcagttaggatgactccaattgacctcggtgtgtatgtagatctggccctgtgggagtttatgacatttagagacctacaaatctcctgacattctgggtcctgaaactgttccccacagcaccgtagatctggcgaaaagctgtgtttgtgtcctgtttcctaagagaataacattttaagccagttgtccaggaattctttcaaggcaatcttctaagtactcatagaataaacaactcttgctttctgctttactcaaataatttgtgtcaaagaaattctcagttaagcatgaaagggagcttgatttgaagtccaagctctggctccaacagtttttttttatatttagattcatcagctgcagataaaggggctggatggcccctaaagtacctgccagctctgcctttctaggatgccagtgattttgataacatttattgactgcccactgtgtttcaggaattgttttgttgttttaagtgctatactattattagctcatttactcctcttggtaattctttgatgaaggtggtatttgtacttccattatacaagtgaggaatcaaagggagaaacagaaacctctaagttcactttgtgaaatgggattctcacctttgcaacatggctctggagacttgctcttcacaatgacagttgcaagagaaaaaaattacccaatgacactcggtaaagcatggtaagtgtattcgtccatttccatgctgtgatacagacatacctgagacttggtaatttataaagaaaaagaggtttaatgaacttacagttccacatggctggggaggcctcacaatcatggtggaagtcgaaaggcatgtcttagttgccttatgacggcagccaagagagaatgagaaccaagtgaaaggggaaatcccttataaaaccatcagatcttgtgagacttattcactacaatgagaaaaatatgggggaatgggggaaaccacccccacgattcaattatctctcaccaggtccctcctacaacacgtggggattatgagagctacaactcaagataagatttggatggggacacagccaaaccatatcagtaaggaagactactcaggaccattgtgacaggcacatggaccacttcaacagggtcttgcagctggggagagagactgggctcaactttgaatacagcatgggcaagtgggagtttatagccaaagaacagggtgagggtcagtgggtggaaaattaccaacagaaaacaatacgagtaagggggatcctggctaaacccacctaacaggattcttgctgaagacaggccagggtgacctgacatcacctggtgggtggtggaggatggggaacctgaacacatatcaaggatgattagatacccaggactgggtggttctggctaaactgacttaccagggttctttgctaaaactggattttacaagaaagcgcatagatgggcctaggagaaaattcagaagtccaactaaagtttggccaagcacataatctttgtcacactggactgccaattttttttttttttttttttttttgagatggaatcttgctccgtcacccaggtgatctcggctcactgcaacctctgcctcccgggttttaagcaattctgtgcctcagcctctcgatagctgggattacaggcatgtgccaccatgcctggttaatttttgtatttttagtagagacgaggtttcaccatcttgggcaggttggtcttgaactcctgacctcgtgatccacccgcctcagtctcccaaagtgctgggattacaggcgtgagccacggtgtccggcctggactgccaattttatgaggctataatagaaatgagaagtaaggcaatgagtgaataataatcatttatcactatcaaatcgatagccagtatttattttgcaaaaggatatgacattttgtttgaaacatagtcacctagtttacagacttgaattctgcacattttcttagcacaggaattaatttcttaagaaacaacaacactaaggggctattaaaatgctctggttggatgttaatttgataatagatcattttgcttgaaatagatgggctcttaagttaggcttagacaaggattctttttctttgctcttcacatttaatactgattgatcaatgatagacagaaaaaggaaagtgatatacaaaacacagaagtgaggtacagaaacagccgtattggggctgggtgcagtgccacatgcctgtaaccccagcactttgggaggccgaggtgggcagaccacttgaggccaggagtttgagactggcctgggctacatggtgaaaccccatctcaactaaaaatacaaaaattagccgggcatggtagtgtgtagtcctagctactcgggaggctgaggcagaagaatcatttgaacccaggtgtttgaggctgcagtgagttgagatcacgccattgcactctagcctgggagacagagtgagaccctgtctcaaaaaacaaacaacaaacaaacaaacaaacgaaacagccagcttggttatagctcagcatttgtcttatttgaacacagtttgaacagttggctgcctttattggccaaaactcagtgattggcataagagtaagttatagtctctgtatacctccagtcagactgtagttcactatgcatagaaaaacctgtaggccaaacttaaaataggtaaggagacacctttaggctaaagttaatttaacaagtttatttacaacctctgtgctacagggtttttttgcctccaactgcagcatttgaagttgttcctgggggtccagggtgtgctcgtgaggaaggatagtcctggccccgtgagagggtcttcaggcctggggaggcatccattgtgctgcttctttcttgcgctctgttgcttcctcagctaggcgctgcatcctgccctcccctggacactgcagctattcacacaccagggctctggagggactcgggccccagagtggggagaatcctcctcttcctctctgataccctctctttattaggtgacagaatggtgtttcctccgctagagtgctgggagctttcagtcctaacagaacttgattttagtctctttgaaaagcaagtatgagtccagtccggggaggctggcctggaaacaatggcttgctgtacacaccatcatttttctcctctgattgggaaacccttgttacgggtcacactgcctccctgacacttttcttttccactgagttctgcctggaccctcaggctttccgaatatagatttctggccaacagcccccaaattgtgttaggcatgcttgaacatgcctgaacgtggagtagaaacagcttaggtccaggctggggataacagagcaacccacataaggcttatttccttaaaaaaatagattgatttgtttaaaattcaatttcctgttaaaggaattcccaagtccagtatccactgctcttctctgcaaaattttaaagaaattattacttaaaaataatttgtctaaagagactcttgactacagttaatatttttaacaaatatttttggtttctttagaaaagagggtttttttcttttcttcttgttttttggtggagcggggacagtctggtgataagtatcagctgcctgagctctgtttacggggtgcggtggtaccagcagatctgctaaacacaggctttcaatgaacccgttcattttaggcagccacgcttcccctccgtgagttacattgtgcagatggtccccggtcttctctctaactccctcctgtgctccaagctgctgcattcagccgcctgttgctctgcccatcccacctgccaacactcaggcatcccttctatgtcttctggaaatttgttgaaattagtgatttccccccttcctgttcttttaattgctcaaggataatatttttataacgtctcatttttatttcagagaactttcagaaaggcaccatcggtcttgagctggaagcccgccttttaggttttgaagagagaagaggtggaggaggatgtgtgctccatgaagacgtgttcacagactctaacttgctatggagtggccagagggctcgacgaagatgccaactgccttcagatgtctccagctcctatcacggctgtgtgaagctataggctgtggtaaagaccaaccaggggagaacaagcaaaggccatttattcagaggctgctgtatcaggggagtcagccacccacacatgtcttatggaaagctgcttctgccccaaccctgttttagctagtcttcagtttaatctgatatccggtaccacctcctaccccatttctacccatcttaggttcattggctgggacgcctgtgacaaaagacagattaacaagagaaaggtacacaaatttatttaatatgtgttatgtgacacaggagccttcaaaaggaaatgaagttctgaagaaacagctaaacctgaatggtttttgtcgtagatttgagaagaatgaagcattgtgggaaaatatgacaaagtaaagaaaaagaatgagagaaatgtaataaatcggggaatcttagaaaagcctgtttgctcagattactctctgtgtcccttcaaagagataatacccaatgcttgtttcccctgtgtatagggaggacccctcgcacaaaagggttttgatctgcttcaagggaaggtcagacagagagtcttttcctgtccatgtactttctcaaattccttcagcttaaaatcaacatgtcaaggtgccatactttaaagtagtgatatggtttggatctgtgtccccaccaaatctcctgttgaattataatccccagtgttggaggtggggcctagtgagaagtgattgggtcatgggagtggagttgtcatgaataagttagcactaccctctcagtcctgttctcctgatagcgtgtgagtgagttatcatgagatttagttgcttaaaagtcggtagcacctccccaaccttcctcctgccctggccatgtgaagtgtcggctcctcgactttgcctcccgccataattgtaagtttcctaaggcctccccagaagctgatgccgccattctttccggacagcctgcaggattgtgagccaattaagccttttttctttataaatgatgcagtctcaggcatttctttatagcaataaaagaatagactaatacaggtagtatgtgctgaaactcatcgcaggttatcaaaaaatgaccaggaagggtatggtaacctagggttgtttaataggtcttgtgatgccgattttagcctggccttcttcattggtaagagttgttaagcatcttctttctggcacaggagagggagacatcttttccaaatgtaaatttcctttacaaaaggaagacgtattagagcttttcctggatctactggttctcaatggcctttagttcaaaattgtccatatgccaaagaggcatattttgggtggcatgctttgctacccttcaaagccaaatctgcactcctacctgatcacataagacaccttgcttccaccagtgtgccacatcagtttaccattgtcatggcaacacccaggagttactgcccctttccatgacaatgatctggtgacccaaaagttactaccccttccctagaaatttctgcataaaccactccttaatctgcatgcaattaaaggtaggtataaatatgactgcaaaactgccctgagctgctaccctgactgtggggtagccctgctctgcaggagcagtcacggagctgtaacactgccagagttgtaacactgctgcttcaataaagctgttttcttctacctctggctggccctttaattctttcctaggcaaagccaagaaccttgtgggctaagctctgctttgggcctcacccacactacatcgcactacatcagaaggaacatatatttttcctcttttatactttcctccctcaccctgaagccctaaacaccttttcctttgtttggcctaagataacctttaggttactcatcactgcctactcccacgtgtatgtgtgatgcacatgtcagtaaacatcatctgttttatttcttgttaaccttttacttgcctaatgtatagggctccagctggagaagctacaatgggtaaagaaagatgattattatttttttctcccctacagctttgcctcgttggtccagagttagaagcagggacaaaaattagagaactgtcagttatcaatcaagtcctggtcatttggccaattgctataggggttattgctttggcttcctggattgttggtagagatagcagtctgacttcctgcaagtctgaattatggcacgctggcttccttgggtggttattgtagataaggagttggtttcctgggtaggttgctgcaggttgtgggtcagaggtctatttttatatactgtctggccattgtccatgggtacattcagtttctcatgactataactgatttggaaattttattcatcttgggttttcaagagtaatagataaaattttttggtagtgccaggcatttcatgcatattatctcatttaatcaccgtgccagctcctcagtgggttaatatttaccttattttttggaacagaaaatggaggcaaagagcctgaaaaatttgccaagatcaaaacacctcaggagtagcagagctgaggttttgaacctaagtctaattcttttgaagctcatcccttcttctagatgtgtgacagaacttctcaagccacgaattgtggcagtaaccaggctgtgggactggtggatcggggaacatgagtccccttcaatgtggctctcttgtctgcatgccagggggctttccagcaaatccatagttggttccagtcctcccttcagccgcttttatttttttatattttttaattgtgcaaagtacacataaaataaaatttaccattttaatgtgtacaattcatcagcattaagtacattcaaatattttgcagccatcatcagaactttatcatcatcccaaatggaaacccataccctttggcagtcactctcccttttcccttcctttccaccctgtggagaggaggaaaaatatcttttttctctacctgtcctccattcctggctgaggtcccacaccaaaaaggagattaataggagaaaagcaaacaaatgtatttaatataagttttgtgtgacacagtaaacttcataagaaaatagagtcccgagaaatagccaaacctgaatagttttatgctaggtttgatgaagaatggaccatcatggagaaatagaacaaaaagagtgtgatctaacagcgataaactgggaggaacttagcaaggtctatttgttcaaaatcagtgtccttgtgttttcagagaggaagatgtttctttcctctgggtataggagggcacctctcacatgagactcttatgacctgcttcaggggaaggtcagaaaatccttcctgcacatactttctcaaattcctttagcttaaaatattccttcagcttaaaatattcactgtgccaaggtgccatattttggcggtaatgtgtcttgaaattctgtcatctggaaatcacgaatctactttctgccttgtggatttgcctattctgaatattttatatgaatgaaatcatattctaatcatatactaagaggccttttgtgtctggcttacttcacttcgtgtaagattttccaggtccatccgtgttgtagcctgtgtaagtacctcattcctttatttaaggctgagtactattctgacatatggatatgacacattggtttatccagccatctgtagatggacacttgtttctaccttttgctactgggagacattatgctgtgaacataggagtataagtttttgtctggacctccagcagctttggctctgtgctcccagagagctcactgtatcatcatccccttgtttctctaccagacctagaattcttccattttatttttttgagagcaagtatcgctctgttgcccaagctggagtgcagtggtgtgatctcagctcactgcaacctccgcctcccaagttcaagtgattctcctgcctcagcctcctgagtagctggaattatgggcacctgccaccatgtacggcaaatttttgtatttttagtagagacacggtctcaccatgttggccaggttgctcttgaactcctgacctcaggtgatccacccgtcttggcctcccaaagtgctgggattacaggcctgagccaccacgccctgcccagacctgggattcaaccctggggcagtccatcttctggaacaggtagggcaggctgtggaggtaagcaggagagctctaggaagtaccttgagtgaactccatgcaggtgccccttctgtgactgaaagttataccacgtaaaatattttcttaggctgaatgcctgaccctttctctgcctgtcaaactgtgactcaccttttacatctggttcaaatgtcacttctctgacttatgttcttggcagtattcttttgggtataagatactgaaagaaaagatggtgtaaatcctaaagaaatccataggcattaaggataggagctatggtaatagccaggattcatggtaactataagcaaagagtggaaagctaccagagccacgctgccactttcttaatctcccttcgtcctgcccctccctcttgtcttctctccatctctcaccagacgccgaagtatctttgcctttctctttgctttgtctctactgtggcacatgacccagcatggccattgctagcctttccacgttgtaatccttcaacttcagttactgttttctggtgacatctctttctgtccttttgttgactcaatgcatggatatctggcttcatcatgggtgggtcccctcatgtaatgtgtcccccctcctggtctttgacccctgaaaccagggtcatgtgacctcctgtcccctgtgggtagactttccagatgtatctataagaatcccccaagcatatgtaatgtctcttgcttttgtatttatttatttttttgaggcagagtctcattctattgcccaggctggagtgcagcggcatgatcttggctcactgcaacctccacctcctgagttcaagggattctcctgcctcagcttcccaagtagctgggactaaaggcgtgtgccactatgcccagctaatttttgtatttttagtagagatggagtttcactatatgttggtcaggttggtctcaaactcctgacctcaggtgatctgcctgcctcagcctcccaaagtgctgagattacaggtgtgagccactgagcgctggccacttttgtattcttatagcactttgtcatgtaggtgcctaagcactttgtcatgtatccacctaaacaagtggataacattcaaataccacatttgctctaggaaaatgaactattgcatggcagggactgttctgggtatagctgatatttccagcacagccacttgcatattgttgtttaatactaatatgctttaaaaatacagaatcggatgagattaagatacttaagtttcttccaaatgtatgagaacatatttaaaggcaatgtcagggaattccaaactagaggctgcatttggactaataatttgagagcacactgagtttatcagatttgttttccttaccttgaacaagctgcttcaaagcagaaagatgggggtgtcatttctcagccataggggtgacagagtcacttgcatgtaaagaatgtgcagaaaggcagttctagcggatacagagccctgcaaagagatcacctagtgagttcagagacggcactgggtgggctggcgtctgtgtgtgtgtgcggcactctcagaggacagcactttctcacccatcatcccacttcctgctggaatggttatatggcagccaccagtagagccttcattaagcccctcccttgggtcaagcaggccaaggaagcggaaacctgagcttgtacaatagcagtctagcctttgtttaatgtggctaggatttaatgtgtctaatgtggttgagtgaggttgaatggggagaggaaattattggcagtaggtttggtgaggactgaagctggccaaataggcactttattctaatgatgaccgaatgctcctgttcctactccttttacttgcaaattagtttactccccccaggctaggcgacgaggtggctcacgcctgtaatcgtggcaatttgggaggtggagatggaaggatcccttgagcccaggagtttaagaccagcccgggcaacatagtgagacccctagctttacaaagaaaattagccgggcacagtggtgtgtgcccagtcccagctactagggaggctgaggcaggagaatcccttgagcccaggagttcaaaactgcagcaagctgtgattgtaccactgcactccagcctgggcaacacagtgacatcttgtctcaaaaaaaaaaaaaaaaaagaaaaggaaaagaaaaaacaatcaaatcagtttcactttccagtcattttttttctggccttcagttcagactctgtggttgcctgcagggaggaagagttcacacattttaggtacaaagattagggcaatattgacatggcaaatacacttctcaaagaacagtggaccgaaagatgtggatgcagttagcttggagccaaatgggtgctgctctttgactatgcaaagacagtcttggacctccaagaagaagtaattgggccgggcatggtggctcacacctgtaatcccagcactttgggaggccgaggtgggtgaatcttttgaggtcaggagttcgagatcagcctggccaacatggcgaaaccccgtctccactaaaaatacaaaaaaaacttagctggacttggtggtacacacctgtaatcctagctactagggaggcggaggtagcagaatcacttgaacctgggagatggaggttgcagtgagccaagattgcaccactgcactccagcctgggcaacagagtaagactctgtttcaaaaaagaagtaattggaccaggcagtgggaagtagagatggggtctttgggatgagaacaagtggaggattctcctttggatctggtttctaatatttcccaaaaatgtggcacgcagaccaatgatgatagaatataatcattggttatatggactgctaggtattaattttaatgtggattagaaaaagcaatataacttgcactccaagtgtgtgattctaaagctgtggcaatccagtttatgcagaacatactgatcccaggcttggtgtaagcgcatgctcgtcaatattttaaacccgtaaccggactttcttccgtggtatttttagaaataccagtagaatgaataaccattgctgtattgccttcacacccaggaagctttcttcagccctctctctttgggactatcaggctctgctggggatgagagtgattcggaaagactgttgagcccactctcccagacagaccacacagaaatgaatgcttgagcaagagtggactgttctcggtgtgcctagcctgcatggtggcaccggtccctgaaataatgccacagtgaaccaagggaagcctgggcctgtgccaacagtgcccatgcagccgagcctcttggaaacataaaaggggaatctaatacaagtttgagttatgggctacttcttttcagcttaaaaaagttatttaaaaattcaattaattggccgggtgtggtggctcacggctgtaatcccagcactttgggaggccaaggcgggcagatcacaaggtcaggaggtcgagaccatcctggccaacatagtgaaactccatctctactaaaaataccaaaattagctgggcatggtgggtggcacatgcctgtaatcccagctactcaggaggaggaagcaggagaatcccttgaaccagggagttggaggttgcagtgagcagagatcgtcccacagcactctagcctggcgacagagtgagactgtctcaaaaaaaattcaattaattaattttatttttattatttttataagagatgaggtctcactctattgtccagactagagtgcagtggtgcaatcatagctcactgcagcctccaactcctgggctcaagcaatcttcccatgtcagtctctcacgtagctgggactacacgtgtgtgctaccacatatgggtaatttttatttttgttacctttttagagaaagggtctcaccgtgttgctcagtctggtcttaagttcctggcctcaagtgatgctcctgcttcagccttctgagtagctgggattacttgtgtgagccaccacatctggctgtttttaaatgaccaataataactgtataaatgtattgggttcaatatgatgttttgatacatgtttacattgtggaatgattaaatcaggctaattaacttatccttcaccttacagacatcattttttggcggtgaaaacatttaaaatgtactcttttaacaatttttaaatatgcaatgcattattatttatggtcaccattctgcgtactagatcactaaaacttattcctcttgtctgtctgaaagtttgtaccctttgctgaacatttctcctttccccatccaaacccctctctcagcctctgataatcaccattctactttctactgctatgagatcaacatttttagcttccacctataaatcaggtaatgcagtatttgtctttctgtgcctggtttatttcatttagcatgatgtcctctagttcatccatgttgtagcaaatgacaggattccttctttttaaaatgctaaatagtattccgttgtgtatatataccatgttttcttttccattgatggattcatagtttgcttctgtatcttagctgttgtgaataatgctgtcatgagtgtgggaaagcaggcatctcttggacatatttaatttactttgtatgtatcctcagtagtggggttgccagatcagatggtaattctcctcttaggttttgatggaacacccatactgttttctataactggttgtatgtggtggggatttttggtggtaaattatcaaggtatctcattttgagtattattctaacattcttttctaaatacaattttaaacttaagagcattattttgttttttaatctcatatactattttgggctacttctggatttttgaccaagtgtttctacttttatttattttttcttttcttttctttttttttttttgaggcgaagtctcactctgttgcccaggctggagtgctcactgtaacctctgcctcccaggttcaagtgattctcctgcctcagccttctgaggagctgggattacaggcaagcgccatcacgcctagctaatttttgtattttttgtagagatgaggttggccaggctggtcttgaactcctgatctcaggtgatccttccacctcggcctcctaaagtgctgggattacaggcgtcagccactgtgcctggcctctacttttcaaattgcagtagtgaaggagttaaaaacatgccatccccaaatatatttctctagcatattgactatgtgagttaaagacacttgaagtacagcagataacagaagatcacactgaccttcatgctgtttcttaaaagccagagatgcaattcccacgtgagagacaccctccccgtacgaagagaaataacacgcttatcctcaatgatataaagttgagactaaaagaattctgtaagactctgttaaaataacttctcttttaagtttccccacatatttcagatgcttctttttttaaattattattattatactttaagttctagggtacatgtgcacaacgtgcaggtttgttacgtatgtatacatgtgctgtgttggtttgctgcacccattaactcctcatttacattaggtatttcatctaacgctatccctcctccctccccccaccccatgacaggccccagtgtgtgatgttcccgttcctgtgtccaagtgttctcattgttcagttcccacatatgagtgagaacatgcggtgtttggttttctgtccttgcaatagtttgctgagaatgatggtttccagcttcatccatgtccctacaaaggacatgaactcatcattttttatggctgcatagtattccatggtgtatatgtgccacattttcttaatccagtctatcattgatgggcatttgggttggttccaagtctttgctattgtaaatagtgccgcagatgcttctttacaacttactattctttgttcaattcagcacacaactgactctaactgcttctaagagcccctgtgccacataaaatctgtattaaataagcttatatataggcatatctcggagatattgcgggttgggtcccaatcactgaaataagcaaatatctcaataaagcaagtcacatgaatttttttggtttcctagtgcatataaagtttatacttacactaaactgtagcctgttaactctgcagtagaattatgtctaaaaacaatgcatagaccttatttgtaaaatactttattgctaaaagatgctaaagaaataagtgcctcatgttggaaaaatggcacggacagacttgcttgacttgcagttgccacgaaccttccatttgtaaaaaaaaacacagtatctctgaaatgcaatacagctacgcacagtatgcctgtatttttctcctgttaagcttttagatgtcaatttaattcttgggtccagcctaacaggatagaggtggagttttgtcttccctgtagtatggttatcaagtttccttgaaaactagatttaaggggttttcttttaaaggtaattttttttttgagacagagtctcactctcttgccaggctggagggcagtggtgcgatctcggctcactgcaacctctgcctcccgggctcaagcgattctcctgcttcagcctcccaagtagctgggactgcaggcgtgtgccaccatgcccagttagtttttgtatttttagtagagatggggtttcaccatgctggccaggatgatctcttgaccttgtgatccaccctcctcggcctcccaaagtgctgggattacaggcatgagccaccgtgcccagcctaaaggtaatatgttttaagaaaaatatgaagtactgataaagtgtcttggaatgtgacacctggtgcctctaggtgacgtgtggatatagcaaagatctggaaagtagcaaaagttaggcaaacactggcttacatcattactttgttcttacacctcctgcttttggaaactgtgtgtcccaaggtcaagattgaatcccccctctgtcttaaatgcagaagctggtgttcccctctctgaactttagtggtactatctatctatcccattagttccctattttttttcttttctttttctttttttgagacagagtctcactctaacacccaggctggagtgcagtgatgtgatgttggctcactgcaacctccgcttcccaggttcaagtgattcttctgcgtcggtctcctgagtagctggaattacaggcatgcaccaccacacccagctatatatatatatatatattttttttttttttttttgcattttttagtagagacagggtttcaccatgttggccaggctggtttgtatctcctgactcaagagatctgcttgccttggtctcccaaaatgctgggattacaagtgtggaccaccatgcctggccccgatgggcccttagagtagtggtcctgtgtggttagttctgcttctgtatgctcaaatcctgccttcccaacaagacctaacactctttgaggggaagaatggggtccatatctccagccccaagtaggggaaaagaaccatcttcccccacccattgctatgttcatggctgaagcccctgtgacaaaaacaattaacaaaaggaaagcataacaaatttatgtaataagtttatgtaatacgggaaacttcagaaatgaagtcacaaagaaacaggtaaacctgtgtattttcagtgcttggtttgatggagaactaagtagacctggagaagagtgactgtattttttaaaagtatgcaagaaacttgtgggaacttagcaaagctgatttgttcagattcttctctgtgaccctgcgtcttcagagagaagaaagttcctttcctctgggcatagaaagagcccccgtggaacgagaatcctgggacctgattcaggggagaagggcagaagaaggtgagagtcactttcctgtttctgctgttttctcaaatgtgaatgtaccatgttttagggtatcctgaaccccatctcccatccaccctgcctcggcccatagtctcttgtactgtttaatgacaagagcaaattccttatcctcgccaagattcggtttccccatctgtaaacggagataatgatgagctcacttcatacttttacttcattgttgccagggctaagggagtgaagctggcaatagataaatggtgcctgataccatacaccttgcggggccatacaaaaggacacagcactctgtcctcctagattgttaactttcagtcttaaataaaagagctagggaagaaaaagctgttaaggggccagtttgagaaagagacagtaagtaacagtttgtttctcagggggcgcagcctcccctgggtatgggcaggaatttaccaggcagcacacacacagggcactttgagcacagcccacttacctgctaagacttagggggtgtctgaggcactcagagcactgagcgggctattgtgggccccgaaccaggaaaaagcgtccctgtaattgagcaaaatgcaccctttctctgggttaaaattcccaaactcaaaaggtttcaagtgatcttattttattgttattttctttaacaggagactttgaggtgtgaactgaaagtcgttactcctcccctgagcttgactgctgggttacccagaggagcccagtgtcctgcaatgaatgggcatattatgccttccattaaaagttgtggctcttaattaaaaacgtgatcgtgagtctttatggagacattgtttaggttttctttagctgttaacacataataaatcattttaaaaggaccttttcccctatcttttaatggttagtgcattttaaaaaagtgatttgaaaataaaactgggattaaatttagtgtttgacaaggtgctaaggggctcaccacctctgccaggataagacaagagggctttacttcatttgctactgaccttcttgttttcctagttctagcctggcttgatcgattcaaatggcagggtgactttggtgtcagaagtttaactggcaggtatcaggaaaagctgcaggcagcctatgccaccccatctttcctttattatcttgcaattacaaagcattcaactctgctgagaagaaaagcctgcttttttttatgaactctccagtaatgctataaagcaaggaatgacgtgggtcgcgtgtgggcgcatgtgtataatccacgaatgccggagacctcgccctcattctgtcttcctagcacaggttccttgagagtgcagtgaatggcttgagatcttggctgccagtcatcttgggagttctgagcgaacagaggcagggactggcttgtgtctgaatgacggtcacaaagacttctgcatttattgtgcaagttcttagggcccttgggttggatggaacagaggactcaagacggaaggacaagccgggagatgtggcaccgtgggtgtgcaatgtacctataggaatgcctgcagacagcattcctctgcaaaggaggaaaacaatactccatgcgggtattatgagagggcacgtgcgaaagggtttttgcaaactgagtgtcaccagacaaataggagagatgatgatgatgcttctgccaattctgcttcacaatcattttcaaaaatcatttctttgcaaaatttctagttggctgagaagatggtttcagctctctgcgtcctgcattctaatgagatttccagatagagaaaggcactatgttgtttgctgctaggcaagatgcttgctgtccatgacgttttccttgctgcgaggtgcccatctctaagctaggattcggcctcagagcctcggtgttgagcagtttcgccgtgaggccaggagagggcgggctgcccctctgctcttccgctcctgggctcccgtctccctgtcctggctgtgaccctcactcttgtgtgccacggagaccacacacatggcgggcagtggtttttcatcatgtttactgaagggaaagggaatttaagaggaattctccagaaattacaaaatgccagacgtctcattcctggttacagcccattccagcgtttatccctgattcaacctggggtcactctcggctcagactctcacctcccgcagcctctctcctctggctttgcccagcctactgtctgcctgcctccctggctctcgctctcagtcctccctctgggtccccccgcccagtccctacctcataattttctttttgtatctcaggccggtctccccatctcccccacctcagagaagaggaatgatctcattgctttcacacgtttcgaggaagacagtagcttccatccagcctaagcagaaaacccgcaaaactcatgacttccgcgttgacctgggagtgcacctgccagtacgtggctttccactttgagaatgaatgacagtcattccctttcacctgaaggaaaagctctgtcctctcctagtcaactctgcagccttcgactttagaaaaaagaatcttctagcaggaaggcttaaagggggtccccgatgaccggtccagtgggccgggcttggaatacagtgggtggcagtgagctgcccgccgctgggggcagctggtttcatctggagaaccatgttgtctctcctatagctgcagtccggtggcctagtccttctctctggaaacatacgaagtgaacctcatcattttcctgacagtcctgaagttattcagagacagcaatcacatctggggtgttttcttttcccggttaaaaaaatccccgtttctgggccgggcgcggtggctcactcctgtaatcccagcactttgggaggccgaggcgggcggatcacgaggtcaggaaatcgagaccatcctggctaacatggtgaaactccgtctctactagaaatacaaaaaattagccaggcgtggtggcaggtgcctgtagtcccagctactcgggaggctgaggcaggagaatcgcttgaacccgggaggcgaaggttgcagtgagccgagatcctgcctactgcattccagcctggttgacagagcaagactccgtctcaaaaaaaaaaaaaaaaaaaaaaaaaaatactatgtgccaacagtaagcactcagtaagtaaaaattctaacactgttatatttctagtattatactcttaaatactatcatttgatcaatcctatctacacagaagtataaaacagatgcaatgcatgaaatagaatgaaaacaaaatctcgttcctttcccggtccgctaattccattcctacaagagcacctgtgcagattttgtgtgtatacttccaggtattttctatgcatggacaagtatacatttgtatataatctctctcccatgaacggctttatactaataggtacagctatgtcttaatttttttccacataataataaaattgggacatcattctagcctttccatctcaaaaagtagaaacctgcctcatttaaaaactatttttatggcccggcgtggtggctcactcctgtaatccgagcactttgggaagccgaggcgggtggatcacgaggtcaggagatcgagaccatcctggccaacatggtgaaaccccgtctctactaaaagtacaaaaattagctgggtgtggtggcgcatgcctgtagtcccagctacttgggaggctgaggcaggagaatggcatgaacccgggaggtggaggttgcagtgagccaagatcacaccactgcattccagcctcacaacagagcgagactccatctcaaaacaaacaaacaacaacaacaagagaaaactatttttattatatatgcacctatgtacaatttttggaaagtgcatgggtatggcgtatacactgtagttttagcagaagcatttgataccatcaaaagagtaaacacaacccatatatagcctctgaagcataatagaatgaatacctgagactctaccactcaacatcagaaataaaacatgagtgatagtgttgaaatactattgatattcctccctattctctctccacttccccatcaggaatccctcatttttctcattccctcactcttcttactagttttagcatatatatatttgtctccaagtaatgcattgttttgttttgcctgtttttactagcttaaaaattgtattatattgaagagatctgtgatttgcttttttttttttgagatgaaatcttgctctgtcacccactctggagtacagtggcgcaatctcagctcactgcagcctctgcctcctgggttcaggtgattcttctgcctcagcctcctgagtagccaccacacccagctaatttttttgtatttttagtagagatggggtttcagtacctttgccaggctggtctcgaactcctgaccttaagtgatctgcctgccttggcctcccaaaatgctggggttacaggctgagccaccacagccagtgtgtgatttgcttttaaattcaacattatgtttctgatgtacatgtcaatgtgcttagccctatttgatttccactgttgaacttatgtcattatataaaagatttatctaccaattttgggttatttttcattttctgctgtggtaaataatgccataaagactggacgtgtcttttgtatttttttaaaaaatggttgtattgtgcgactggccataattatttattcttttattaataaatatatgtgtgtgtgtgtctatatttgttcttgagttatcttctctgtgcggataaagatcatgtttatgctaattctgaatacatctgtctatctaattgttgactattgcctttctgcatgacagataagaattttcattacttttttttggagacaacatctcaccctttagcctgaagagacaggctggagtgcagtggtgcaatcatggctcattgcagccttgaattcctgggctcaagtgatcctaccactttagcctcctgagtagctgagactacaggcacatgcctccatgcctggctaattatttggaaatttttgtagagacagtgtctcactatgttgctcagtctggtcttgaattcctggcctcaactgatcctcatgccttggccttccaaaatgttgggattacaggcataagccactgtgctccaccaaacattttcattacttttaccatcagcaatctggtacactaattataaaatgcttatattatttcctagctcctttagtcacatctgcaaattcaaacgttagccttcaattcccatttctccattctgtagtatcgcaaacttgtctcttatccttttctctgctagttctcttcccctactacctctcaaactttattcaagtttttattattaaagtttataatatttatatgttgttatgtaagtaacattgccttctctgccagaattgattctaaaagttgaaaactaacccacaacacttatcattcataggtatgcaattactgttgtctgcagaaccaagtaatctgctgtgattacattttgtggctatatgtaaaatatgatgatccttgggacacttacaggacaatctttctctaggttcaagttcaaatggggtctgctttttctctactccataattgcctttatcatcttctcacatttccccagttttcaatcctgagagatatcctatccatttcccctactcagcccctccctaaactcactctgtatcctaattggttatgatccaaacctgttgctgtcatcctgggatggttatcatacagagctaggtaattccagagtttaccctctttttcccttccttcctttctctctcctttcttttcttttctttttctttctttctttctttctttctttctttctttctttctttctttctttctttctttctttctttctctttcctccttttctgcattggattgattgaagattccacatctttctctatcttggtttatcctcttgttttacaagtcatttcataagaatagtttcattggaggtaaactttctgatctctttaaaatcctgaaaaatactttacccttacatttcattgatgcatgaatcagtcagaacacaaagaaaatggatgttattcaatttgtttataaagtcacttactcaacaaacgttgaataagtattatgtaccatacactataaataaaaagatgaataaaacagttttgccctggagttgttcctagtgtagtgacaaaggacaaatatacacacttaattacaatacaatgaggtaactgctctctcagaaacatgtaatattaaaatatgtactctagataattagataataaatgcattggccaatcatcaagaaaaaggtgtgactgtgacttggtttttgagaaatattaatagctatgttctaaatatttgacatatctcatttcattctcacaacaatccctatgaggtcaactctttctccttttttttttttgagacagagtttcactcttgttgcccaggctggagtgcaatggcgcgatctttgctcaccacaacctctgcctcccaggttcaagcgattctcgtgcctcagcctcccaagtagctgggattacaggcatgtaccatcacgcccagctaattttgtatttttagtagagatggggtttctccatgttggtcaggctggtctcaaactcccaatctcaggtgatccacctgccttggcctcccaaagtgctgggactgcaggcgtgaggcacgcgcccagccctttctccttttgtttaaagatgagaggatagggtctcagagggattgagtatattgcctattattacagaacaggtacatggaaaacaaatggttatcatacagagctaggtaattccacagtttaccctctttttcccttccttccttccttccttccttccttccttccttccttccttcctcccttcctccctcccttccttcctttcttccttccttccctctctctctctctttctttctctttctttccttcttttttttttttttttggacaggatctggctctgtagccagactgaagtgcggtggtgcgatcaaagctcactgtaaactcaaactcctgagctcaagcgatcctcctactttagcctcctgagtagctgggaccccaggtatgtgccaccatgcctggctaattttttaaaattgtttgtagagacgaggtcttcctatgttgttcaggctggtcttaaactcctggcctcaagtgacatcccaccttaacctttcaaaatatggtggttttagggggtaaccactgtgctgggcaagagtttactatcctattcactccattattttatatcacaataagtgttcagtagaagaagatagaatggtggctgttgtcctagagatggttttctggagacagtgaggtaggaacacagtcttgaaggattttcaacatttgaataaacatagaagatgcaggggagaggattcctagttaaattcccttgaagggggtttaaccagggtgaactgaattgcagtgggtgaaattcaggtggtaactatctgttttcttttttaaaaaacacttttacaagaactttctaagctcaagaaaatgtcttaatgaggattcttccttctctctttccccagggttgtgtagtgatcctaaaagttcagctggccagaccatcagagaggtctttcttctcccctccccctgggtggtggctgggatgttcatcctctttgtccacatggcttctggagtttggcagctcagctggttttgtttttcctcgagaaccttactgagcttttcctgggttcatcaccagccatccctctgtggtctgaccacattctatcccagagaactaaatgagtcctcactgctcaagtgaccaacctgtagtcgctacagtctggggaaaaatctctccccttctctgttggccttcaaaatctctctctctttctcactcgctcatacacacatacatctcttctctctgaactccaaacacgatcttttcaatgagctcaggcttctgaaaacatgcagatctgttgacttgaagcaacgtctattttcagtgctacaagagtcatgaaggcaagaaaatgggaagggagaaaactgagaaacagaactgggggcaggctaagtgggtgcagccactcggaggaatttgaccatatctggtgacgctgaagagacacatgttccaggagggcagctggcggttttactggggcacagcagcattcgctgatttttgtattgtctacagctgctttcaggccacagtggagagctgagaagttgtgacaaagaccatttggtgtcaaaagactgaaacatttcctatctgtgttgttgacccctgtttcagatgaacaactcgacttctagatatgcacggttgactctcacagatgtgttttagaggacacgttccctacagtgctgcttgtagtagaaaaacctggaaacaaaagaagtatctttcaacggataaatacattatagtgttcttcggctgtggaatacaacaaagaaagaaaaacgagtgaactaggactgaatgcatcaacataactacaaataccctgaacaaaatgttggccaggcacggtggctcactcctgtaatcccagcactttgggaggccaaggtgggcagatcacttgagtcagaattttgagaccagcctggccaagacggtgaaacctcatctctactaaaaatacaaaaaataactgggagtggtggtgcacacctgtaatcccagctccttgggaggctgagacaggagaattacttaaatccaggaggcagaggttgcagtgagctgagatcgtgccactggactccagcttgggccatagagcgagactcagtctcaaacaaaacaaaacaaaacaaaataaaaaaaccaaatactctgaacaaaatgttgagagagaaatgtgtaccatatgataaatttatttaaattttaatgaaatcaaaaggcattatacatattgtttaccaatatgtgtatttatatctgtattccctatatatgcaatatatattttatatctgttataaagagagggaggaatagagacaggagagagaggaagagagaaaaagagatatactaaacatctgtgtagactttaaaaaacacaaaatattatccatactgttcatatatacatatatgggtatgtgtgtgtgtgtgtgtgtgtgtgtgtgagagagagagagagagagatctccagaaaaggtgaggaatagtattggtgagaagaacaaaaagtgatctacctataatgttttatctctattatttaaaaaaaatgaagttgaaatggcaaaacattagcatttgttaattccggatagcgggtacacagatatgtaggtttatcatttcccccgcccctgtactttaaaaagcttcttaaaaaacccactaagggcttagcaacttgttcgaaacgcaggccgtgagaaggaagaagacgggggaaaatgatcctgggacatacttgtaattttcttccctggttcagctccgtggctgaacacagtgggggaggtcacccctccgcgtctttccctctagatagcaagggtgtctgacaccctattcacatttctcttgaagaagccctgctgttttactgcagtttctctgcatcaaggacagcaatgcagctttacaatgaaggtctttggtctgcttgactttctgtgcttggatgtcagagacccactctgaccttggtttgcacttgatcaattgcctccatgtttaagaatcgtcagtggaaatcctccaatcctctgtgataaacctgctctctaaggaacccagtgggggcaaaactgtgtttatttatatctctgagatcatcagaagtgtctacaaggtactctaaaactggtagagtgaaaacagttatttgagcttgatgagttttgtaagagctgttcctgagggctagttaggttctctaaatttccagagctgtttaaccctgttaacaagcgtgaaagaaaaatggattctagcttaggcctgctttatacattaaaaatacgaaacatgatttttttcttttttattttttgagacggagtctcgctctgtcgcccaggccggagtgcagtggtgcgacctaggctcactgcaagctccgcctcccgggttacgccattctcctgcctcagcctccagagtagctgggactacaggcacccgccaccaagcccggctaattttttgttatttttagtagagacagggtttcaccgtgttagccaggatggtctcgatctcctgaccttgtgacccacctgcctcggcctcccaaagtgctgggattacaggcgtgagtcaccgcgccccgccgaatttttttttttttttaattgagatttgggcctcacctaccttttgaaaagttaaaaaagcaagtgtagtgaaagttctagtttcatcaactcggacagaatcactgcttaagtagaattgaaagaagcttcgggagaaagaaagtgtcatctcacaaacccctagggagggggccctagacacagttagatgtgaatacttgtccctaggtcttcaaatttcaaaagctttagggaagaaagacctgttattccaaacctgaatcattatgagggacaataacccagaaaggagaaaatgccctcagaaattaaattctgacaatatacttacaaatgatttttgatgaagaaaagagggagatatctttaaaaatcaaaacggctatactctctgattaattcatattttaagagaacatgtacaagagatataaggggaggcctagtacaagggacaaatggagaatagtggctggcatgaatgtgcaaaggcagagaagcaccgaggcttggaaaagcctcagaagacaggagcttcctcacagatgtcagagaattacgaagaatggatgaagcctctctttgaagtgaatgtgaaatagataacacagaaaaaacagaacgactctggtattttaaaacttatttttaatctgttttctgtatttgccaatctccaaatttgaaagaagctcaacaaaaatcttaaagtgggaattgaatctctgcgagatagtaatcatatatgcaatatgaacattttaatttttcttttcatgtttttgtcatcagaatcattcttagaaaatgaattgacaagttttctctcttttctatgctctgaaaccattgaattgacataaaaggtaacttttaaacacttgacagaattgattttttttttttttgagatgcagtctcgctctgtagcccaggctggagtgcagtggcacgatctcgggtcaccgcaacctctgcctcccaggttcaagcaattcttctacctcattctcccgagtagctgggattacaggcgcccgccaccaaacccagctaatttttgtatttttagtagagacggagtttcaccatgttggtcaggctggtcttgaactcctgactgcaagcaatccacctgccttggcctcccaaagtgctggtattacaagcatgaaccactgtgcccagcccatcagaattcatttttttaaaaaatttatttgtttatttatttttgctcagaagacttagaccaaagtaaccttggttatgagctcccaatagaattcatttttaaagctgcttaaaattaggactctttgtatggataggtcttgaacagatttcttcactattttttctatcattattaggcttttaaattttatatgtatttagtgtcagtttttataatttatgttttcctggaatttttttatttattaaaataaaaaagcatttttctttattaaaataaaatatgtagcatttgtttagggttttaaaaattgtctctatccatggttataaatggctataatattcctgttttcagactctgacttgtgtacttctgtttttctctttttgattcattcaacattacttctgtttttcttcagtttattgacacttgcctttatccttattcatttctctttttactggatatatgtatacatgtgtatatttttaggcctctcacatgaaaagattttagtacttgtatttccatttttccttttgataatgaaaggcatttaagaataatttctctaaccttaaacgctattgttatttcctaaagagtatgtaattatacgtttaaaattttttaatttcaaaatatttttgaatttatagaaaattgcaggccgggcatagtggctcacgcctgtaatcccagcactttgggaggccgagtctggcggctcacctgtggttgggagttcgagaccagcctgaccaacatggagaaaccccgtctctactaaaaatacaaaattagccaggcatggtggtgcatgcctgtaattccagctactcgggaggctgaggtaggagaattgcttgaacccgggagacggaggttgcggtgagccaagattgtgccattgcactccagcctgggcaacaagagcgaaattgtgtctcaaaaaaaaaaaaaaaaaatacacaaagtagatgtttaaaaaaaaaaaaaaaaagaaagaaagaaaattgcaaaaatagagaatcccccaactttttttttttttaggcagagtcttgcagtgttgcccaagctggagtgcagtggtgtgatctctgctcactgcaacctctgacttgtgggttcaagcgattcttctgcctcagcctcccgagtagctggggttacaggcacctgccaccaccggctaatttttgtatttttaatagagacagggtttcaccattttggccaggttggtctgcaactcctgacctcaagtgatccacccacctcagcttccaaaaatgctgggattacaggtgtgagccaccacgactggccagtaccccaactttttaaatgtaatagtttgagatgtgttggagatatgtgaaacaggcctgatttatacattgaaaatatgaaacgtgaatcttttcagaaaaatttctataatcatgatacagttattaaagctaggaaattaacattggtacactaacactaagtaaactacaaactttaatcaatttttttcagtcatgttttccaatccagggcaccatattgcatttaggtgtcaagactccttgaccaaactatattgttcctcattcttttttttttttaattttgagactttgatgcgtttgaaaactacccatcagttagtttgtaaagtgttgttccatttggatttgtctgatgttttctcatgattagattgaggtaatgaatttttggcaggaatgctgcagaggtgatgcgcattttcagagtacattacatcagaaggcacatgatattaatgtgtcttattactggtgatgtttattttcaccacttggttgaggtctacttgagtttcttcaaaataaacttaccatcttcccttttgtcatatatatcatgggatataactgtagagtattcaaatatcctatttcccctcaaacttttaccaattcattttattatgcattaatggattttgtctataattactattggttactttccatcttcaaacatcctatctccccccaaacttttgccaattaattttatgatgcattagtggatttcatctctaattattactgttggttattttccatcttcctcgtttcttttgcatttattaattggaattctcctgtaaaagaatagccgtcccttctctgccattgacttatttattcaattatttacttatacctgtatggtctcatggatattgattttaatagattgattacaatctaatactattgttgttttctttgttgttcaattggttccagtttgggatactaggtgctttctcagattggctcctatgtccttttgacaagcccccatccttgcttcagcactttcttactttctagcctcacaagatgtcacaggttcatcatgtatttttcttgtctcaacccaggaattagctacttctccaagaagccctgtcaccttttattaaagaatggtatttagaaactaaggtctaggcacaggatgtgctcattgttactgagatttcattgcttctaggctcgctccatggaaagagcttgagaatactacatgaatatgtattaacccatgtagacacagaaacctgtacctatcaatctacttacatagctattaaaaaacaccctatgagttcattttgatacctttaattcaaatgccacaccacaggactgggcacagtggctcacccctgtaatccctttgggaggccaaggtgggcagatcacctcaggtcagtagttcaagaccagcctggccaacatggtgaagccctgtctctacaaaaaaaaaaacacaaaaattagccaggcgtggtggagtgtgcctgtagtcccagctactcaggagcctgaggcaggagaattgtttgaacctgggaggcagaggttacagtgaactgagattgtgcctaattattctcatatatttcttttttcttcacccctgaagagttagtgatggtgacaactgcagctgtgggtttgacggctatagcaatggtagtgcaggcagtcattgtttgtttgtttttttttgtttatgaaatgattgaaggaacttacaatattgttcctgaaggggtgagaacttggggtagtgacagttgccttcgactctatgatgtgctttatatgtagagaaactgctggacttttctgttttgctctaaacttttgaataataggcagtgggcattgaaaggcaggttgatgtagggtgtggtggttcacacctataatcccagcactttgggaggctgaggcgggcggatcacaaggtcaggagttcgagaccagcctggccaatatggtcaaaccccgtctctactaaaattacaagtaattagccaggcgtggtgttgggtgcctgtgatcccagctaccgaggaggctgaagcaggagaatcacttgaacctgggagacggagattacagtgagctgagatctcgccactgcactccagcctgggctacagggcgagaggcagtctcaaaaaaaaaaaaaaaaaaaaaaaggcaggttgataacagcttaatatgtggaagaatttctaacaagtgtaagtggccagcggtggaatgagctttcagtgaggaaatgggttcagtgttagatgtaggtagataaagagagtcacttgccaatggtgacatagaaagtaacctatatggggcaggaaactgggagtgagagtgatctctgtgatcctgttggacacaaagattctcatagtcttatatatagtcctacataaattgttacaaagtgaaaaacattattgggagttcagtcttctgagccacaggccacctcttacctcttttagagtgacgtcatgcttaagagcaggggctacataatcagcttgccatgggctacatcctggctctgcctcccgctagctctgttgaacacgaacagatcacttaccgctttgttgtgtgagttaaaggagataatgcatgtagggtggagtgtctgcctggtgcatagtgagggcactattcatcgcagcaattgttataacaagttccctccctcaactgccttaatctctttgccttcattttagcatgttctattgttttcattttgtattgcctgacagtcctcgctacattggggaggacgtgatatcttggttcttttgtccagagacttgctgcgtatcttggagctccttttggggagacccatcccttaggcacattctgacttactgtagtcttactttttcagctctgctacatgcaatattatgttctccaaaattgtgcaggtaggaaatccttcattctttccttcacctttgtaggtaatgaaggagccaaaattctctcaccatcgtgaatatctaccaagagttttcacaatgctgcttgacattgttgtctgctctgggaaccagataaacaagtttattgcacttcagcctaaataacctaagtcatgtgttcatgatcttgtcttgggcctagctttggtattagtgttggcttaataactgaagaagacattttgtttaaattctcactttgataaaattttggaaccaaggggatttttttttttcaaagcaaaattttacaggctctcgtgccttgctccttagagctccatccggtctgcagccgcgcctcttcatttaccaccagtaaaagcctggtctcggggtgggccacacagtctgtttccactttctgcactttggctgacacctaaaggggaaagtttcctaaaaccatgacttggtgagatatcctagctgccacttccaagggagtgtttcataatattgtccaatcacctggtgtctggtataagagggccaacacaagtgtcttcaggctttgtctttcagaaccaataattccatgaaatgcgaaaggaaaggttgatttctgcaagtccctgctttcaagtttcactgcaaaccatttgcacaggaagtcaaaaacatctgtattggaagggtttggtcattttctgaaaaattctatcttttctttaatcaaacataccacattttcttccgcttggcaggactaaagcaatctggaaaactggaattgtaggatcttagagctggacagaaccttatgaatcatccagtctcatctttcctcagtgcaggaatttccttagaaacattacaaatggctctaaattctttcctgggttgaggtctcagtgcttcctaagacagaccatctaattgtaggctgatttttattgttagatacctctttctttttggctgtggcaaaatgtcactaataactttctagtcattcataaggacgggcaaagatttcatgacaaagagaccaaaagcaatcacaacaaaggcaaaaattgacaaatgagatctaattaaacttaagagcttctgcatagcaaagaaaactaccagcagagtaaacagcctacagaatgggagaaaagttttgcaaactaggcatctgacaaaggtctaatatccagcatctataagaaacttaaataaatttacaagagaaaaacaaacaaccccattaaaaagtgggcaaaggacatgaacagaaacttctcaaaagaagacatatatgaggccaacaagcatatgaaaaaaagctcaatataactgattattagagaaatgcaaatcaaaaccacaatgagataccatctcccaccagtcagaatggctattattaaaaagtcaaaaaatagtagatgctggcaaggtcatggagaaaaagaaacacttttacactgttgatgggagtgcatattagttcaactagttcaattaggtttctggaaagcagtatggcaaatcttcaaagagctaaaagcagaactaccatttaacccagcaatcccattactgggtacacacccagaggaataaaaatcattctcccataaagacacgtgcacacaaatgttcattgcagcactgtccacaatagcaaatacatggaatcaacctaaatgcccatgaatggcagattggataaagaaaatgtggtacatgtattccatgtaatattatgcagccataaaaaagaacaagatcatgtctttggagggaatatggatggagctggaggccattaccttagcaaactaatgcagaaacaaaaaaccaaatctgcgtgttctcacttataagtgggagctaaatgataagaacacgtggacacagacttgaacaacagacactggggtctgtttgatgggggagggggaggggaggaacaggagcagaaaagagaactgttggtactgggtttaatacctaggtgatgaaacaacgtgtagaacaatcctcatgacacatgtttacctgtgtaacatgtaccttcacatgtacctccaaacctaaactaaaggttagaaataaataaatagggccaggtgcagtgtctcatgcctgtaatcccagcactttgggaggccgaggtgggtagatcatgaggtcaggagttcaagactagcctggccaagatggtgaaaccctgtctttactaaaaataccaaaattagctgggcatggtggtgggcgccggtaatttcagctacttggaagcctgaggcagagaattgcttgaacgtgggaggcagaggttgcagtgagccgagatcatgccactacactccagcctgggcgacagagcgagactccatctcaaaaaaaaattaaataattagaaaaatgagtgggaacatgcacatacaacacaacacacacatgcgtgcacacacacacacacacacccctttctagtcatttgtgttaggcaaaaacgtggccccagtgatctcggcctcttggtgttattcctgtgaatgcgttatattacaaagggactttgcagatgtaattaaggttgctaatcagtttttttctgaattattgtgcaggcctaatctaatcacacgaggccttgaaagcagagctctttcttcagctggtagcataagggaaggtcagagattcatggtaaggaaaggatgggatgtgctgtcattggcttaaagatgaaaagtgtcatgtgccaaggaaactgggatctcagtcctgcaagagccagaaacaaaatccttccaacaattcaaaggggtttgtaccctttgatttcagccttgcagaactctgagcagaagatgcagctgaatcacaccatgcccggactcctgacccacggacctgtgaaataataaatgggtgttctttttacttaagacaggacccccagagtcatcggtgactcttgactctccttagcatccacatgctagttatgacctgtgcattccgcttcagggtagctcaggcaatgcccctcctgtccctcccaaatgccacttacagtacttcagccccttcctgagactatggccatgtccttgccacctggtgtactcctccaccacactacatatgaacagtataacacatgggtggccaaccatccagtttgcacaggtctgaggggcttcccagaatgtccaactttccgttttaaaactgggaaagtcctgggcaaatcaggatgagtgagtggatcactctgctgttggttgtctgcacatgactgagatgcctctgtcaaaaaggctggtcatactagatatttgtttctggatccttctttgcagcttgggcttcggcatataatttaatgtcggtcaatggtatcaaagggaaatcttctgggatgtgaattaacagagatgcgccaaaagaaatgaccattcttgttggtttcaagtgtttctgtataaagttatgatgcctggagctggtcatgagcagttaagcctaaggaccaagtcattatgctgatgagaagaaagagggaaggagccgggctccttgaacacatggctggcccactgcatcaagccttcagccatttccttctggacattgtgttatggaagagaatatcattgcagccacctgtagtcaaggattttgtttcttgaagttgaaaacatcctaatgggtaagataccatggctattactcattctgcctcctgaacacctgtttatatatctatgagcattgcagaatacagcctttcatagtactttggtcacatttgcattgccattttgagtccttatttgaaattctagtatatagaaatagttttctttcacatacaagcgcagtaggtggagtagatagcagggcaacatagagactttgacaatgaaattaggagagacaagggaggttgaaggaaggcaagccagaacttcagaactgttctcttccctctttaaagacaaaaggtgctggggagcatatgacaagttggcagttcgtgtggggcaaaacattatccagagcaaggcttgggggatacaaccctgcaaattgggggaagtgggtggaaaatattacctggcattggttaatatgtgtttatgtattcagcatatctaattgccctactctgagtcttagagacaggcagtcaagggaagagggggcctacaactctgggccataagtgtgaagttactgaacatttacatccaagaccagttctgaggggacgctgcaactccgtgtgcattccatcagcaacaatgcacagtagatttacaagtgtctccacagatgtgttagtaagcatcaaatatgaatgaaattcatattcatttatccatttcagagaaacgccattggtaatgtttatatttggtgaagagcctttataattatgaacataaacatatttataagagctttcatgagctcatttgtgactgcgatcccccaactgtatttgaagatcttaagttcagatatgtcagattttccttctgtgaggttttcagggggatgaccctcacagttcggcatggggttgcggagcagagagtggatttgtctctgcctctgcaggcacagtaccgtctttgtgtttgtatcttcaatgtttatcagggacaggcaataaatatttttctacaacctaaatcttgtaggatcttgttgccccattgcctaaaaacttccagtagctctcactgcctatagaattaaatccttagcatgatgtataaggccttccacagtcgcatctcagtttatctggccagtctcctcctcagatcctctgccatttcctcctgtaccctctgatgttgcacacagtagtcactgttctccaaatgcagctggcacttcctcacttgtgtacctttactgattctgcccccttcgatggcataccctttactcaatgtattcctggtaaagtcctacacatcatttatatctaactgaaggccagctcctcttcatgatttctctttgtgcatatgccttaaaagcaggtgagcacctagcagaatgcctagcatgtctgatgtactcaataagtgcctgtggcattgagttgagatgagataaattgcaatccacctctttgtaagtttgaagatgggcactagctctttcctgaacatacacaagacaaatccattgccttttccacacaaccaattcaatatttgaaggtacccatccagcatctatttaacctttgcttttccagacccttccagtgattacaatgaatatatgagtcactgatgatcaatccttaatagtgtgcagagctttttatgcatttatgtcatttggccctcagacaacttcatgaggaaggtaaagcagatataaatctgtcatgatccccatggtagagatgaggaaattcagttctagagaggacaagtgacttgtgcaaggtcacatggctattcagttgaataaggtgagtcagaagaatgacattctcatgttcttttgtttgcctttttgagtcctaaccgtcttggcctttctattctgaggcacctctaatgtggatttaaagggtttttgtttgtttgtttacttttggtcctaaagttagccaggagttctgtttttctttctgtggttgtcttatttggcattggatggaagttgagtggagctagaaagcctggttctgactgagcactctgtgtcctagtgcaaaatgggcacggagggcttgtgaacatcagggagtgtgccaagtgttactggtcagtcctggtgatagaaatttttgcactttttttttttcactcgaaccacatggggatctccatctgaaagctcccagactgtgattagagccaatctctgacagagtttccaggtataagcaccctaattgttcacaagtcatacaacaaatgtgcatcattttagccaggtgatctcaatggcctcccaaagtttgagaattgttcttcggagtccatggaaataccaccttttcatgtgacaaccagcaggcttgaatttctctttcttctcctaaattgtatgtatgcaaatgtgtgcttttgtgtgtgttgttttgtgtgtgttgtatctgtgtggttagtgtgtgtgtgctgtatccctgtgtgttgtgatgttttgttgtgcatgctgtgcgtgggtacatgcattatgttgtatgtgtcttgttgggtgtgtgtagggagtatatgtgttgtagctctgtgtcctgttgtgtgtgttgtctgcttgtatgatgttaggtgtgtgtgtgtgtgtgtgtgttgaatttgtctctggtgcctgtgttatattactgtgcattgtgctgtgcgcgttgggtaggtgtgttgtgttgggtgtgtatatgttgtatctgtgttgtgttgtgtgtgttagctgcttgtatgatgtgtgtgtgtgtgcgtgtgtgtgcgtgcgtgtgtgtgtgttggtggcagagggagaaaggattgaggaggaggaatctgtcttcttcttaggaatggcagggatgttgaaaaaccttctctaaatccctaatcttttcacccaagattaagcatataaaattgttggcttgaagaagtcagattcttgatgactccaaagagacagcagcaaagtgagtcaagaagcttagcttcctatcagcaaagagataaaggggcttcagctctgaatgacagtttgagcaatataccctaatccgattaccagggaattcagtgtcactctatattaatggtagattttaaaaaatgagggctaaagagttagtgttcattatccaaagacttcagttattccttaggatgaaatcacccttgcctgaaactcagggttaaggggcaggagactggggtgaggctggggcgaggggcagcggcggctcatctcctagaagcgtcctttgttcccccaggctttgtttaagctgtcagcttctcctctgctcagaagagagaaggaggagtggagcccagggggatgtggcaaagtgagggggctgaatgaaacaccaagtaaattctgctttgaattttctagctggaaaattgtcacattgagtacatttgctgcctcctttaacctccaggctaaaacaattcctcattttaaaattgtcctatgggatttagcatcttttaatactttatttggtatttggaggaaaagaaaggcaatgcggtgtgaaagaatagaaaagtatttttccattacagagctaattaatctccagggatttcaatggaaagcctagtgtgaaaccgggcaaaagaatacaatttgcaggtaacaaacatactcgtgggtcctgaattctgtttttttggcttctctgttttaaatccaaaccaggtccttaaagaccaaggctcactacttagctggagcactgatattttgtgtttccttaatgaaagactgatttctagaccaggtgcccagaacttttatggactggattatgctttgaaaatagtctcacctggaaagtgattggcaaacatttcaactatttctacccttggccttagttgggaggggatgccttgtgaatcttgggcagtaagctggaatgtggtctttatgaaagtgactcccaatattcccctaagattctaatatgacactagacttggactgagcattcagttcacttacctgagtgaaaataattcgcttttaactctggttagaaatcaaacttatgaagacaaggagaaagccttatatggttccatggaacttcctgatctcagagaacccttaattggagtctgtttttcctaacatacgcaaacgtatgtgaagcagtctcgtgtagaaggttctcttgttttagcagcttgagggtaaaggcaaatgtcttcactaaacttataggaattgccaatttgttctatagggatattggtaattcccaaatcttgttgatcatcatcaccatgaggatacttaccgaaatacagaatcctggttcaattctagacctaatcaaattttcaaggggcagggcacattttaagagctccccacttgaagctggtgatgaaccaggctggggagtcactgaggcaggacatcttgaggcagaggaggactcctcagggaatgtagctgaagtcctcaagacggtttggtcccttattgtctaatgatctttaaaattttttaaaattaaaaccttattttgatatatataatgtcgagtttggaaaatctataaagggtgtagcttatgtcagaaacataaatatttctatggttcaaatcattgccctttatattttccagctgatgaatgtaaggcttacaaaaagcagacaacttggtcaggctcaaccacggactaagtggcagagccatgtttcaaactcagttttgttagatcccaaagagtccatgctctttctcctacatcatgcttacaagtgaagaggaaatacatggggcctgaattccatggttcctcttttccaggtggatttttaactaagggtgtgtcttcttacagccttctagttttcattgtgtttgttgcttataattacagattgctccagaggagaatagggtcaattctttccatttggcatgcaggtccttagctatttgtgagggctgaaccagaagctgtaggcactgatgttactggctgaagtcgcactggaacatgttgctcttcatatttacgtatgctatttgctacatttctcattatcctgaatgtaagatgtgtgcttgcactcagtgcagttgaaagaagttaggctgtttgattcagcaagaaaatcctcttcttccctaaggagttcatggtttacatgacaaagcactttaaaaatcaagtgaggtattctgcattcagaaataacggtaaggtctcaagtcagggaagggagtaactgggcagtgcagatgtgtactttgaaataaggctggtttgattctaaagactggagcgaaaatggatgtcatcatagagaataactgtattgatatggtttggttgtgtctccacccaaatttcatcttgaattgtagttcccataatccccatgtgtcgtgggagggacccaattggagataagtaaatcatggggacagtttcccccatgctagtctcatgatagtaagttttcacaagatctgatggtttcaaaaggggcttccccctttgctgagctcttattcttctctttcctgctgctatgtgaagaaggatgtgtttgctttcccttctgccatgattgtaagtttcctgaggcctctctcagccatgctgaactatgagtcaattaaacctctttcctttataaattacccagtctcaggtatgtctttattagcagcataagaacagaataatacaggaaattgttaccacagagagtgggctgctgctgtaaagatacctgaaaatgtggaagtgactttggaactggctaacaggcagaggttggaacagtttggaaggctcagaagacaagaaagatgtgggaaagtttagaacttcttagagacttgttgaatggctttgaccaaatgctcctcctcttagacggagatgaacttgttgggaactggagtaaaggtccctcttgctatgcaaagagacaggtaacattttgtccctgccctagagatctgtggaactttgaacttgagagatatgatttagggtatccggtggaagaaatttctaagtggcaaagcattcaagaggaaacagagcataaaagtttggaaaatttgcagactgatgatgggacagaaaagaaaaaaccatgttctggggtgaaatttacatcagctgcagaaatttgcataagtatgaggagccgaatgttaatcaccaagacaatgtggaaaatgtcttcaaggcatgtcatagatcttcatggcaccacctcccatcacaggccctaaggcctagaagggaaaaatagttttgttgcctgggcccaggtccccctgctctatgcatccttgggacatggtgccctgcatcccagctgcttgagctccagccatggctaaaagtagctaatgtacagctcaggccattgcttcagagggtgcaagcctcaagacttggtggcttacatgtggtgttgggcctgccgatgcacagaagtcaagaattgaggtttgggaaactctgcctagatttcagagcacatatagaaatgcctgaatgtccaggcagaagtctgctgcaaagtcaaagccctcatggagaacctctgctagtgcagtgtggaaaggaaatgtgggtagtagccaccacacagagtacccactggggcactgcctagtggagctgtgagaagagggccaccatcctccagaccccagaatggtagatccactgacagcttgcaccatgcacctaaaaaagctgcagatatttaatgctagcatgtgaaagcagccaggagtggggttgtaccctgaaaagccacaggaacagagctccccagggccatgggagcccacctcttgcatcagcatgccctggatgtgacatatggaatcaaaggtggtcatttttgaactttaaggtttaatgactaccctactgggtttcagacttgcatgggcacctgtagcccctttgtattggccaatttcttttatttggattgggtgtatttacttaatgcctctatccccattgtatctaggaagaagttaacttgcttttgattttacaggctcataggtggaagaggtcttgtctcagattagactttggacgtggacttttaagttaatgctggagtgaattgggactttgggggattcttggaagggcatgattatgttttgaaatgtgaggacatgagatttgggagggtcaggggtggaataatatggtttggctgtgtccccacccaaatctcatcttgaattgtagttcccataatctccacatgtcatgggagggacctgatgggaggtaattgaaacatgaaggtggtttcccccatgctattcttgtgatagtgagtaagttctcacaagatctgatggtttcataaggggattcatttggctctcatccttctccttcctgctgccacgtgaagaaggacatgattgcttccccttctgctatgatcataagtttcctgaggcctccttcagccatgctgaactgtgagtcaattaaacctctttcctttataaattatccagtctcagatatgtctttattcgcagtgtgagaatagactaatacatgtgcagtctgagttgataatgagttggtgaaattgagtggagaccttgttacaaatggagcaagggagaacaaagaatgaagaagggaacaaaatgggtgaagctgattggagacaaaagttacaaattgaatcagtgggaacaaaaaatggattggagacaaattgttaaaaatagagccagtggggacaaaatataaagaaagaaacagagatggatggtggacttgggattaaaagagatgagataatgaaatggccatatgcttcaaaatggaaaatttagagcagaattaacctctgtcaacttttggaaaaattctccagatttacttcaagagttgtggcagttgcccccctcaaaagaacttgcccatcttaactattctgttgatgatataatgagcactaagtaaaccttggataataagtagataatgtatagtatactgatgatagtatattccaaaatgacatactctctgcatgacagtaatactttatacatataaactatttccctttatgtgtctgaatcaaagccgggtggagaatgagattcttgtggaaaaaccaatgcaggaagtgcctaaacttgggttgaactggagggtaggggacagtggcttttgataggagaatttttttctcctcattatctctggggggcagaaaggcaggcatcccttggagcaccatgtttgagcagacagtaggtttactactgtcttttaaatgaatacatttaaaaaacctttaaaaaatatgagaattggaacagttaagtaagtaaagaaaaggaaacagcaaagctaagtcagcccatagatgtcagtagaatcaaaaggatctggctaacaggaagtgggattccaagctgctcccactaacaagaatagggtttcattgatgttgcttctacgctttgtttgaggcagaggctgtataagcccattcagcaggaatctcggcctttggatttccatatcaaagacagactgtagttctctgcttgccttggtggcagtctgacagccaatatcctacctcagatcaatgcactctgccagtcatgaccacaatgggaacttcctaagttatctgtgctgagaaatgtattcttttcaaattatttgcgaggcacatttcagcagggaggaaaaaccctccagccttttggctctggaggtgagatgagactctattatcagctgagctcacctccctctatgttttcttctggcatcagaattcagcggcatctaagagtaaacaactgtgaaagcaaggtattttgatattttcagctttaactattgtttccagctcttcaattgattttgtaaaacgcacaaaggctcaaatgaggatgaattattctctggaggcaggccacactcagaaaaggtatctagttttccttccttcccatctctccttccctcttctcttcctttcattcttccttcctcctaatttttctccttcctttttttaaaaaaattctttttatcttgttctctgcataaaaaagggcacaggaacagcaacacatcatacaaatgtgattattatattccaggaatcactagatggcttggccacaatggactttctctaggaaagttaaaggagaacttcatttattgtaccatgttatgattagtgttgctccactacaccctcaaatagtatttttaaggctcaaatttttattgtagacataacttttagattttggactattagaagggccgaatctttcaaacaactctggctgcatttggatagcaaagacttctatgtcattgagtaattaagccatgcattcttgtgcaggattatatgataaccattcataacttcttaagatcctttcctccttttgttgccatacctttacatcagtgtttcccagactctaagtatctaggaacactggtgctccttctttgagaagtaagtaggggtaactctagataggcaagtatcttacttagaagtaagtaggggtaactctacataagtctctggttgtgtaagttggggaaatgtcacaacatagtctaaagtcccataaggcaaatctatatatcaaaggctccataaagacctgcagtaaataaagcttcttaactaggttaacccactgtttcacttagagatttgaccagagaacattaacttgtgtgttctccgctaacaattgtgaatctagggcactgtttcagtctacttttctcttctctgaccatgctacctcttgcctctgaatcttctttctcctttaatacccagacctggacttttttcagtgctcaacttttgcttctaggtcttttctcctgtgcattgttttgagagttttataaacttctgtgcatttatacagaatataaactcaacccagtggaaggtcttggtccttctcttttgttcccatttgcatttccaactgattttcttataaatccatgcagaagtcccaccacttcactctcctcaactgaactaaattcatcttttttctgcaatctacttttcacttccaatccctctatgtgttaatgataccaccatgccgccttgacaggaggaaatcttgaagtcatgtttaactcctttttcccctcttggaaatacgattactgacatttcccatacatatcttaagacctcttgcttctgtggagaaacatttaacattaaaaggatgatagcagtctttatttatttacttaaatatttatacaagtttgaggagtccaatctgtgaaattaaataactacaactaatggttggtatcataaaatgtaagttaaattggaatagcattacttagggaactctgttggaattctctatcttccagcctcccacctaccccaacttagagtccaaataaacacatgaagaaaatgaacatcagaataaaattaaaaagaaagcaatactctttcccaaactgggaaaaaatggaagttggtgagggatacattttgagcaactgtaggaacatagagaggggagaatgcattgagtcagttattgagtccaatgctgatacatgcactgctctggcacgcagcagggagtcctggtgtctgtggctgtaggttttattggggcagcaatgcttattaaattgggtttcataatatttgaacttcctgtgtggtctggtgaatggggggccccctgcattcccttcagcttgttctttaaaatgtaccttggccacattagctaagctcctcatagaaattatttctttgagttctggagttctgttgcctggctgccacctcccactgcttttttctttttcttttttttttaaccttatgcacaaaagcagtgcatggtcaccaaataaaaatacaaattcaccaagagaacaaataaataatacctgtaattttatgcaaccaggtggcttggtttgtatcttggcacctacgtctctgctcctgtgtatatatgtgtgtttctttacaaagatcattctgctatcatttcctaatctgcattttaagatttataatatatttgaaaatcttcccacacaataaatgtacttccacagccttatttgtgagggcagcatagtacttcatttctgaaggtcctctgatgttttttggacagttcaattaatggaatttcttctgtcatgaacagtgttgttatgaattctcacagctaaaactgtgtgcatgattttagttttttatttggatgaagtacttaaagtggattttctaaattaaggaggcaaacttttaagttttataaagtatattctgagaaattaacctccaaagaagcaattattattgcttctttctcttatataaatgtttcatatgattcaaattaaaaagtcattttattatttttatttataattgttttattacttattgtgttgaataaaccattacatcttcattcattattaatattactttactagttagtaattcatgggaactactagctcaagtcttctctccttttctactgggatatttaatttttgttaccaagttttaagggccttttctatattaatggcagatattttatagtgagtaaggatttgtttggcatttattctgtgccagaaagccttctaagcttttactcatattatctttgttttaagctttacagctttgtataaagtaggtacaattgttatttcctttaattttggatgaagaaatgaaggcagcatgagaagtttgttgaaaggtacatggtttataaatttaagagcaaaaactttactgaggcaatttgattcttatcctgcttgctatccagcctttttaagaacatgaatatgtgtgtatatacatatacacatatatgcacatctttacacacacacacaaacatttcctttctgattgtgtttgcaaggacttccaaatttaataacagtggtgctgatattcatgtcattcctgattttctctttttagatttttagaaatgtggtctcatgctattattcaggctggagtgcagtagtgtgatcataacttcctgcagcctcaaactcctgggctcaagtgattctgctatttcaacttcccgagcagctgggactacaggaatgcactttcgtgcctaattaaattttttttttttagaaatggagtcttagtatgttgctcaggctggtctctaacttttgtcctcaagggatccttctgcctcagtttctgggtcttctgttacaggtgtgagccactatgcccagcttctgattttaataagaaggtctctagacttccagggttaagaatgatctctgggaggccgagacgggaggatcacctgaggtcagaagtttgacagcagtctggctgacgtggtgaaaccctgtctctactaaaaatacaaaaaaaattagccgggcgtggtggcgggctcctgtagtcccagctactcgggaggctgaggcaggagaattgcttgaatccagaaggcggaggttgcagtgagccgagaatgtgccactgcactccagccgggcgacagagtgagactccgtctaaaaaaaaaaaaaaaaaaaaaaagaatggtctttgctgttggtttcggatagatatatggtttcacattaatttaatatattttattcttattttacaaaaaaccatgattgtaaagaagttaacagcacctttttatttagaaactttttttaacatctaagaaaatgactatcttcacttacccacagtggatagtttctaagacctctggtctgaaactgaggatggtactggactctatgtgtattacggtttttttatacgatagtactggactctatgtttattacggttttttataccttcatacctgtgataaagtttaatttaaaattgcacacagtagagattattaataataactaatagtagagtagaagcattatactataataaaagttctgtgaatctggtctctctttcaaaatatctttctatactatacttccccttacgtggtgatatgggttagctctgttttcccacccaaatctcatctcaaattgtaatccaggggaggtaactggtgagaggtgattgaatcatgaggggtggatttcccccttgctgttcccatgatagtgagtgagttctcctgagatctgatggtttaaaagtgtgtggcacttccccctcacctctctcctgccaccaaatgagatgtgtcttgcttccccttcaccttcagccatgattgtaagtttcctgaggcctccacagccaagtggaactgtgagtcaatgaaacctctttttttttttttttttttttttaataaattacccaatctcaggtagctctttagggcagagtgaaacaaactaatacacctggatacactggaaaaagggatgattcatgtcctgtgtggaatagactggatagcaagaaatttcattatgctactcagaacagcaccgactttaaaacttatgaattgcttatttctgaaattttccacttaatatatttggactgtgagtaactgaaactgagaaaagcaaaaccgtggaaaagggaaaactgcatatgctttagaaaatctttttagattcattgatataattaattatgttcatagtttttaaaaaagactgattcattttcacaattctggagaaagactattgtgctgtcttcaatgtatgtgattgattgattgattttctttatacccttgtctaagactatgtgatttatttaatatgtggctaggtttgttttgctgatattttccttaccagttttcttgtatattcataactaaatatttgtctaagttttttgtttgtttgtttttaaggcaatgtttttcagattctgttatcaggattctgccaattctctgtccatttacttgctttggaacaattgcaatgccatatgaactatctgtctcttgatattagctaggactcaccagtaaaattcctcagtccaggtttatttggggttccttaaaatcattaacgactcttttggcagctatttctgttttcaaccttgtgtcaagtttggaaccttagtttttgctggaaaaatctcatttcattgaaatatcacattagtagatttgtacgtagtgttttatattaaaattttcttttatatcttggttacatgccctatctcctttatgatttttttttgttttggagttaagctgacttagagctctgtccactttactgtcagtaaatcagctcttggacttattaatcaatccatcttttatttccagtgcattacatttttcctttatctttattagtattctctaatacttacctgtttcctttctgtaaatttcctgtgttgtatgcttaggtcattgattttcattctttctagtttataatgaaacaatttaaagctttattaaagataaataatatctttaacttttatttactttatttggtctaaaatatgatgaataatgctaattaaagcaataaaaaagctgaatctagccatctccctactcatacttactaattatataactcatatcttttgtaaactttttaagggtactacttaatcttacaatgacttagagagtttaattacagcttttcacttcagtgttttgtcagtgtttccaaacattcaagcaatttttcctttatacatttcaatatatgccattttcttcataaagattcaaatcaactaacttctctgttaatattttctgcttttattattatttttaactgacacctaataattgtacgtatttatggagtagggtatgatactttgctacatgtatacaatgtataatgatcaaatcagggtaatttgcatatccatcacatcaagtatctgttaattttaaagtttatgagtttaaattgactctccttttcccattttatagcttttgctcagaatttcacttggtttaatactaatttggggactcctgcttctaggggtgccatttgtctgattcaacattttcatcaatttaatctttctgatgccctttgtcgagtatgacacaaaagtgcccctggattttgccacaagtccattggcagtggtgaatcagggggtttcagtggaaacgagcctgccaaacttcagagtactgagcgctcctggctgtatggagctactgcaagcgactcttcccatgagtgtgtctgtgaagagggtgtgacatgagaatgagataggatgagatacataaaaagaaaaataatttggggtagagggtgcgggaagagaattaagcacctttaaatactgatgggaaaagccccagtatagaacagtgttgaaacctcaggtgagaaagtagatcatttatgaaattaaatccctggaggagctgttgaaaataggatctagatcataaggggagggattagttttatgcaagaagagagatgcttcttccatcgtcctaattaggaaggtgaacacgaccctttagaaacaccgggaagcttgaggtggcagcaaaggagaaagtatttccttctgtcttgtgacttctattttaccataaaatagaaggccagttgtctgttgaaaagaagaagggatatgataatgtacagattttcagtggtagaagtttgaaatagtcaccctgaaaaataagtggtagatttttgttttgttttgttttgttttgttttgttttgtttgagatggagtttcgctcttgttgcccaggttggagtgcaatcgcgcgatctgggctcaccgcaacctccgcctccagggctcaagcaattctcctgcctcagcctcccgagtagctggggttacaggtgtgagccaccgtgcctggccaagaggtagatctgatgaaagaaaaacggacaaattgtcacagattgctgaaaactcaagagaaggcagaaatcatggatttgaggtcatactgtttcatgaggttgtataatttccttcactgttatttagcagcctggaagcaagagcagagaaagtgaaaagttaagttgatccatggtgtgtggatttcgcagggccaatggaacagaatcacagcacaagggtgttgaagatattgctgagagtggctgaaatgacagtgggatgcagaaggaaaaacaatcagagctgggctcgaagagtgaactgaagaggaggaggttctggaactcatttcttaatgagatatgccatgccatgaagtatataacatatgccatgaagtaatggagagaaatctgaaaacgtaagaagtgtattttcaaatttcattttatttgggacataataataacagttggtcctgctgtcttctgtttttctgttctatgcgataagatgctttattcagagttcttgaaatcaaattaccaaaacttactcaaaaagaaatagaaaagcaagtccaggtgtggtaggttatgcctataatcccagggctttgggaggctgaggcagattgattgcttgagcccaggagttcgagaccagcctgggcaacatagtgagacactgtctctacaaaaaataaactaaattagctgggtgttgtggtacacatttgcagccccagctactcaaaaggctgaggcaggaggatcaattgagccctggaagttgaggctgcagtgagccatgatcgtgccactcaactccagcctgggagacagagtaagatcctgtttcaaaagaaaaaaaaaatagaaaagttagaaagctctatataaataaaataaatttaattgaggataaaaaaaaaaaaaaacttcccacaaacaaccttcagttccagatggcttgtctggtgagttacataaacatttaagaaagaaatagtaccaatttcacacaaacattcagaaaatacagaaaaattcctaactaattctataaggcctatactactctgacatacaaatcagaataggattacaatgaaataaaactacagacctatatcttttataaaattagattaaaaattcttaccaaagtttcagcaaatcaagttcaacaatataaaaaaaaagtacatcatgaccaagatgtgtttatcctggtaataaagggttgatttaacatctgaaagtcaatcaatatatttcaacatagtaaacaagcaaaataagccacatgattatgtcaatagatgcagaaaaaatatttgacaaaattcaacgtttatttttaatgaaagccatcagtaaattattaagagagaaagctttctcaacccgagaaactaagatgatactcagtgatgaaagctcaatgctttctacaggagcaaggcagggatgtctcctctccccacacctattcaaaattgtgaagttctattcaatgcaataaggcaagaagaaataaataaatggcattcagagtggaaggaagtaaagctgtctttatttgtaaatgccttgttggtatatataaaaatccacaaatgaacaaaaagttaccagaattaataagaagtttagcacagttacaccaagtcaaaaatacaagaatcaactgtatatctctatactagcaattaactattagaaattgaaacaaaatttcactacagtagcatccaaagataaaatatttaggagccaactaaatcaatgatgttcatgaccttatatattagaatgtatataacattgtaaaggaaaataaaaggcctaaaaaaatgattagatgtaccatgtttaatatcctagcaggctttttgttgttattttgggttaattttttaatagactattttttagagcagttttaggtgcacaggaaaactgagcagaaacacattatacttcctgccccaacacaggcatagcctacaccactaccaacataaacaccagagtggaacagctgttacaattgatgaacctacattgatatttcatcatccaaagtccatagcttacattagggttcactcttggtgttgtatatcctatggattttgaaaaacgtatgatgacatacatccaccattatagaccatgcagaatagtttcactgtctcaaaaatcctttgtgcccttcctattcatacctccctcctcctactctctggaaaccactaattttttaccgtcttcatggtttcgctcttaccagaatgtcatatagttgaaattgtacagcacttagacttcgggttggcttctttcacttagtaacatgcctctaaggctcttccatgtcttttcatggcttggtagctcacttatttttagtgctgaataatatttcattgtctggatgtaccagtttatccattcacttaaggactttttatttatttatttatttatttatttatttatttatttatttatttattttttgagacggaatctcgcactgtcatccaggctggagtgcggtggtgccatctcggctcactacaacctctgcctcccaggttcaagcgattctcctgcctcagccccccaagtagctgggattacaggcacctgccaccaagcctggctaattttttgtatttttagtagagatggggtttcactatgttggccaggctggtctcgagctcctgactttgtgatccgccagcctcggcttcccaaagttctgggattacaggcgtgagccactgtgcccggcccacttaaggacattttgttgctgccaagtttcagaaattatgaagaaagtttctgtaaacatccatgtgcaggtttttgtggggacgtaattttcaacccatttgggtaaatgctaaggaacaagattgtgaaatcatatgataaatgtatgttttattttgtacaaaactatcaagctgtcttccaaagtgactgcacagttttgcatttccataagcaatgaatgagagtttctggtttcccacatcttcataaacatttaatgttttctgtgttttggattttggccattctaactggtgtgtggtgatatctcattgttgtcttaatttgcaattccctggtgacacacggtgttgagcattttgtttttaaatctatttggcatctgtatgtcttctttagtgatgtgtctgttcagatctttcattcattttaaaatttatattgcttatttttcttattactgacttttaagagttatttgtatattttggataacagtcctttatgaggtatgtcgtttgcaaatatttttatcacagtttgtggcttggctttcaattctattaataatgctttttgcagaacaaaagtttttaattttaatgaagtctagtttattatttctttcatggattgtgccattggtgttttatctagaaagtcattaccaaacccatgttacctagatttctcctatgttatcttctagttttacagtgtttcattttacatttaggtctatgatgtctttctaagctaatttttgttaaggttataaggcctgtgtttggattcattttttttttgcatgtagatgtccagttattcctgcaccatttgctgaaaagtctgtctttgtttcattgattacctttactcttttgtcaaaggtcagctgactatatttatgtgggtctatttctgggctctatatttgtctactctttcaccaatatcacattattttgattactgtagctttatagtaagtcttgaaggctgatagggtcagtcctccaactttgttttcttctcttccagtactgcatttattctggatcttttgcccataatataaattttagaatcagattgttaattcccataaaataacttgctagaattttgattgggattaaattgaatctgtagaccaaattgggaagaagtgacattttgataatattgagatatgtgaacgcagactatatctccatttatttagttctttgatttctttcatcagaattttatagtttccctcctatagattctgattatattttgttagatttatatttcattttaaattttaaaatgttcattacatattgaattttcagtgctgttaatgcaaatggtgatgcaattttgttcatttttttcttgaatgctgcctgctttctccaatataatgcttaacatatgaatcatagttgttttaagttccaggtttgataattccaacatccctgacgtatctgtgtctgattttgatgcttgctctgtgtcttcaaactgtgtgtgtgtggtttgttttttgtttttgtttgtttgtttgtttttgccttttagtatgccttgtcatttgttttgatggtcgaagatgatatactgtgtgagggagggagagcgttctgtattcccatggttaggtctcagtgttgagtaagcttgtgcctctggattgtgaacttcacaagtgcttctcgtcttcccttccctcccacatgggacagaatggctagagtgggctgacattgggtatttcccctcctctaggtcagctagcctctgataaaacccagaaggttaggctctggctagtttctcctaggggcagacattgttaagaactgaatgctctggcacatttcaaaatggcttcttttaccctccccctgattgaagcaccaagggattttttgtgattgtttacatcagtgaattgaatcagttcattgaattcagtgaattcaattcaattcagtgaattcttgtaggtaataatcacgaaagtttgtgggcttcttgatgactgggtcctctggattcctaaactctcagacatgtccatactgagccttcagaggttcttcagttacagtataagttttcctatctaggcactgtttctggagcagatttctgcttgtgagtttctcctctggtgagctgtgattctctgcatcctcctgtctctttccaactttggggcatgccctgtgatctcactctgatgaatctaagaaaagttgtcaatttttctgtttgctcagtttttacttatttttagaataaagtgacaatttccatgctccttgcatcccaattggaaactgggagtcagagtagtattatatatatttataaatgaagattttatcagttgtcttgtcatacctctctatagaacatatatttaaattatttgttttcctttgactacaaggcttcaaatattacgttatcatcatagtcagaaagtaattaattaaacaatataaacatgctgcaaatttggtaaataattgttaaccatgaaaaataaaattttctgatttaaaacaatttgttaacccagtctttgccattcatcttcttattttcagggaggtacaccaagaaatctttactgaggctattgaaatgatactaattttacttgcttttcatttataggcactttttaaaaaagttaaaattagatggagctcagtttgaacatccctacaaaaattgaaatcatgccttttagtatttcctcaagaagctaaataaataagtgaacaactacttatttattcatctcaaagtttaattctctctatcatctcaaaatgcctttacaaataatagccagatacttgagaatttatatatataatacacataaaaattatatataacatgtatacaaattttatatattatataatatatgatgtatgtacatatacatttatatatatacacacataattttatgttatgcttgaaaacaatttcatagaattagaataatatttaaaatttgagaaggagcaagtaattcaaattaaataaaggcattttctaaacgttaggacatcactagatgtatcatttacattgcatactggaatattttgtctttatatatatacattaatggatagtctctttttcaagtgggagtttactgtgcttgtggaaataatatgcagataaagaagggaagatttggggtcactagtaagctagtgaatgaggagcttacaactgacatattcgtggttgctgtaaagtgctatgtaacataccaaagaaacaaatacaaatctgagaagtacgtggtcaaagtggatgaataagcagatggtgaaaagcagtcagcaggagactcttcaccaagtaaaaagtaaatatagatttacagtagctcatgacctactatctgaagtgaatgcagttatttctcttgtggagcctgagtatttacacaaggatttactcaataatcaagaaaatataaaattgtatcttacttctaatctactcttacactcaaagttgtaacattgatcctttgaaagaaatcttgaatgttttcacttccttttccttgaagtgacacaaaatgtgccctcactaagctctttgtttttcctgagaatggtagccacgcagaggggatgtgcttgtgccaggttggtgttctccctgatgtgggcatgtgtgcgtgtgcaaattctgactaccctaatattatgacagatagacagaggtaagacatggatccctgccctgagtttgtggctttgttaaaactaagattccactgcctttagtatgtcatcctgacaatttcttttctttgctttcaccagattccctaaggagtgatgtatgcattgaacttgtcagaggatagaagaggtgaagtcattaaacaacaatcgccatgtctcctgctgccccaatctatagtatgtctgaattcagatatctcaacatagttcacaataccgtgctttgactttaatagaaatattatagcatgagaatgactcgaaaccctgcatgagtttctggggccttgattaaaagaagttttgcagacaccaaccttttgaatgatctgccctcgagacattttacaccctggggtactgcatcacagtaagatttgggatgaatgagagacatatctttcttttataaaatgggagaaagtgacactaaaaggagcagtgataaaagaaaccacccgacacggtacatttttaggcagcttcatttcaggaaggagtccaaggacattgggaatatgcagtttgcgtcacttaaattctccttggctacatacctcttgggaagtgtttgcatgcccccagaggaaaaatgcctcagcttaaaacaacttctcattagataccaaccttcttctttacctatgttggtttcctagggctgttatcacaaatttccacaaactcagtgacttaaaacgacagaaatttattctctcacatttctggaggccagaagtctgaaatccatttcacagggataaaatcaaggtgatatcaagtaggggggtgctccccagggaggctccagagtacaatccattccttgccttttcagcttttggtggccgccagcccttcttggtgtatggctgcgtcactctccaatccctgcctctgtggtcacagtattttcttttattcttctgtggcagatccccatctggcttccccctgtataaaaacacctgtgactacatccagataatccaggatgatcttcgaatctcaagatcctcaacataatcacatctgcaaagaccctttttccgtaaaaggtaacatttataggctccagttgattaggacctgatgccttggaggccgttattcaccatactgctgtaattaataaatatttttcatctgctttattttctgctgtgtcttcagcacagaaatgatatacactgaaagaagataactaacagttacattaattttttaagttctggtagtggtgagttttcttgtgttctggacaaatgtagctttttggtctttatttttttttttaaatttttttttttttattttttttttgagacggagtctcgctctgtcgcccaggctggagtgcagtggcgggatctcggctcactgcaagctccgcctcccgggttcacgccattctcctgcctcagcctcccaagtagctgggactacaggcgccgccaccacgcccggctaattttttgtatttttagtagagacggggtttcaccgttttatggtctttatttttataaaagttatgaattttggtctctctgtgtgtgtgtgcacacatgtatgaaagatatccttatggatatttaatgatgcattgggcaatgtatcactaaaatatcaggtgctctttaaaattttggaaagcaaagtaaagtgggccataccaaagaaagataatgctcatcaagtcaatgtaccgggttctgattttcacaaaaccttgaacactaaattatatttcctggtgcccaggccctttttaggtactccctaattcactccctccttaaggtagtaaaccccaataattatcaatgattctagataccatggaaccaacgcccatttctttgctgggctattgcaaccataatacttagcaccatttggtcctgagtttttggggttcagagccatttaccccataaagatcatgcattctagagaaagccaaactctccaagaaatagaaatgataataaaataaaagtgttatttgggcatgaaaggcctcttattaactaaataggcctgttgcataccggacaaagtacagcaatggtatcttcagcacacagcccaagaccaactataaacgatccattcaagtcacttagggtccatgtgttaaaggacttccagatgtccttgaaggcagaccctctgttctataatctggatctcatccaccatatggtgctgatttggttgtcgtggtggagcaaggatgaaacacaggctgctttgcaagctcccaaagagttggaaaattgtttaaggcctcatcatttatcaggttggaagtccctatggcaaacacttcctgacttcagtgaagtaaggagatgcatggtacactctaaggacaggctgtttatgaagaatataaattattatttcaatgccctggaataaccccagatattttgggatcttagcaaaattctcagttcatggccagatgttttgagctaaattggaattgttaaatgtaaaatgattatcagaaccttcaggttctattcatctttagggatcttacttcatcactaaaggtgcttacttctcttaattatggccaatggccgctcacactgcagtgtttcagtgatacttaaagaatcagagacaattagaatcaaatggggcatttagagaatatctatttcaacactcctattttccaaattaggaaacaggcacgaataaggtgaataattcatccttgactcacaactggagtaaatgcctccagatttctggtatagaacccattatactcctagggatgacctctctgccatgggtgtcctcttaaacaaggttatcttgctgggcgcagtgactcaggcttgtaatcgcagctgagagactgcagtgggaggatcacttgaggccaggagttcgagaccagcttgggcaacatagtacgacctcatctctacaaaaaaaataagaacaaaaaaattagccaggcttggtggtgctaccctgagtagctatgcctgtagtcctggctactcaggaggctgaggcaggaggattgcttgagcccaggattggaggctccaatgagctgtgattacaccattgtattctagcctgggcaacagagtgagacttcatggctaaaaataaataaaattaaaacaaaaacaaacacacaaaaacactgaagccttctgattctgaactgcaggcaggttgagttagacatgctcattgggaggaaaatccagagccaccttgtctaagtctgttattgctgctataactgaatactacagactgggtaggttatagagaacacatttatttcatataggtctggaggcttggaagcacaagatctaggtgccagcatttggtgtctggtgagggtcttctttctgtgtcctcacatgacagaaggcaaaagggcaagctaatataatgctagtataagggccttaatcccataaatgagggaggagccctcctggcctaatcacctcttaaggaccccacctctgaataccatcaacttggcaacacctaaattttgaaggagacacattcaaactataacacaactgcaatcatattctagtctgctttgctaatgttttcagccatgaagtaatgctctgactcatctgcctgcctccagttgcttgctccttcagcctcattttcacatttctaccaaatataatgtcctctattcttcagtcttccccctcaaaagccatcagtggcttcctgttgaataatgatcaaactctgtcttagggcattcaaagcctagcaccaaaactggcaagtaggttttaattagtgcaccagccctgatggatttttgtcctttctgcctggagctttgtgttgaaaaaggatctaaagctacatctgaattcaatgagaagatgtgttgtgattgattggggattgctgccatgactttggtatctgagagcaaaagcccaaggccaagcatttcttatccctgcccaacacgacccagtctcatcttctcatctatcattccatctctgtgtctcactgtattatcaaactgtttgctccagcaacttcaaactatgttcagtcaagggtgagtaaaaacgtacagcaatatattcctcattagagtgtcagatatttaagaatatccatgtattctacttctttaaaactttcgtatctgtcccttctttgccatctccactgcctctgacttagttcagaccctcgctaactctccctgttctgttttactattgtcctatctgaccatcatttattgtgaattaagaccctcagtagatcccatttcaatttccttagcttggttggaagtccctaccccctaagctcacatacacactttagccactgctaacctttccaacattatctctgccccattttccaatgcaacttgcaatggcagtcaactttcagtgccatttccttgaaggcaaggttcatttcttacttaactttgtatcccacaccacccattatgttgcttataatactgtggatattcaatcactgttttaatgaatggattaatgaatgaagaatcttgaggatctaggtttttgtagatctgttctaagtataagaagtgctgaaaatatgctataacctctgagacttggaagtgggaggggatattgagagccttggccacacaaagaacggctcaccagaggtaaacaaaagttctggaaaaattacctggctaggtagccagacctagacctgcaagcctggggaactctaacttctgtaaggaaggctcagacatcagacttttgcaaagccagcttcttcccttcactcaggtcttgcttcaaacactacctcccctatccattgcattaccccatttattttcctcaaggaacctttcatctatcttacttattgttttgactctttatctatcttccatctttcccagtagtgtaatatcaacatgagagcacaagctcttttggtttgtttacagcagtgtccccagctcctaaaaccatgtctagtactattcaatttgtctaataattggatcgatcaattctcagtactagtattcactcagataagagaagggggcaaatgaggtaatctaggtggtgaccaataactgggggatggataggaagaaaatgattatcaggagaattagtcaatgggttcttgctcctagcctcaggaagagggctggcagtaattaagtcaagtccctaccagttctagagtttggggaagagtgaggcttggaatgctttgaagggaaagtggcaagagaactcctgtgggtaagcaaccttatggggatagcgaatgctccacagctatcagattctggatcaacttggcagtccagaagaattgcagccatgggacctggctctgggtggaccatggtttttaagccatgagattcatgagagagctttgatgtgggtattacatacgtcccaatgttgctggtcttaaatcaggaattacaggaagctcaagtccactaatggagtcacatacttttaagattacggggctggggaaggctacagaaagagaaaaacagagaggggatgagattcagagaaggaaactagtaactgttgaagcttattgtgtgccagtcactgtatctggttacttacatgaaccatcccatttaatcctcttcaaccctacaaggtagatatatcaactccattttatagatgaagaaactaggtctcagcaaaattaaggaaactcctaaaggaggtaacacaaataatagagaaaccagaatttaagcccagacctagacgactcccaaatccatgcattttcttttcattcaaatacagtagttttctgtattgctctgcccctttttcttctgtgatatgtgtgacagataatcacacctctgacatacttctatgtgactataaatcattgaaggtgtcatctgagactctccctctttctcacgcaataatgcatatcagaatgtgactatgatatcatgggaataactttaaatttgtgttaaaaaacagatgattattagatttccaatctgcaaaaagaactggtcatgagacactggatttggatagacaaaggctggaaatgggacatttaattgttcaaatctttttgggttaccatacttggtatggagttaaattttcagggggagctgggattgctgtcattaaaatttattaagaaaggcacagtgaaaagaggaattggtctgaatttggaactcagcctgataaagttgtcctggatcaataagtgggaaattagctggactgaatccacagtttgggcaattagtgagggaaagctattttgttttttgataagttggagtgtatcatggacttaaaacaagagtcaggcttcgttttgatgcaaaaactgtctgatttgggctctaaacctacagatggacaactctaccttgttttaattgttctctgagttctatataaaaaaattttgggaatttgttaatttcatatacaataacaacaaaaatggaatggccattttatgagttcctagaactggaataaaaaattatcacaaatttggtgacttcaaatgacagaagtgtattctctcaaagttctggaggccagagtccaaaatcaagctgtgggagggctgcactacctctgaaggctctaggagaggatctttctttgtatctttcagcttctggtggccccagatattctttggcttgtggccacctaactccaatctttgcctccatcttaataagactatcttctctgtgccagtcttctcttctgcctgtctcttataaggacatttgacaaatctcacttgttattagattttggtctcatttggataatctcgtgtgattgaaatatcaagatccttgaaataattacatcagcaaagactcttttttctaaataaggtcacattcacaggttctagggatgaggaggtggacattttttgagaggccactgttcaaaccactattgtcctctttttccatgtagaggacattaaaatacaagtgaacaaatttacataatgtacagaatgtacagaaatcacctgatttttttttggaatgcagaatgtattataacagagactagatatcacaaaagggtattaaagcaaatcaggtgattgtagacatctggaagtatgattccagccaggagtgagacgatgatgcatcttctggagaacttcttgttgaaaggcttgggagaaatgtgagaaagacttgacttccaggtaaagagaaaatgaatgaagtgggttttgtagcagacaatgttagctgctaacctaaaaccccctctccctgccacctgacttcactagggcagctggaacagccagaaactagctttcccagccatctatgcaataggggttactgtgcaactcagttctggccagtgacacgtaggctgtggattcccaacttatcatttgagaaaaagaaatccttatctttcaagccagtgtttgccaggtgttctggtccttgtagttcaaagcattccctattgatagagttgcttttctagaagaattcagtccttttttctaaacaggaaaattcctaactacatcacaatctccaggcttagaagatgagaaacctgaggatggaaatgtttccttctgacttagactgacaataagcttactgttgggtttggtacctggatttactgacctctcatcttcaaggtgctggttggttgctcacaacatatagtcttagggtagcctacttgtagttaaaggcaaactgtccatactgaagctagtagaggaagctttgccagagaactctgcttatgaaatctactctcattatccaactagcattttagataaccagcagtttaaagaaggtgacaaaaagggaaaaatgcacctgggaagaaatatgtgaattcatgatggtcctgagagtggccttcaagttttgtgattatacctatgtctcatggtatgatcacatttactcaattttcacatatgcatatttaccattcttttccactgaatattctgtcctccattttgtgttcacatatgtgagttaatacatatatatgtttttaattatatgggagtattatgccattcttgcaaagaaatacctgagactgggtagtttataaagaaaagagatttaattggctcacggttctgcaggctgtaaaggaagcacagtggcttctgcttttggagaggcctcgggaaacttacaatcatggtggaaggcaaaggggaagcaggctcatcttagaaggctggagcaggagcaagagatgggggaggtgctacatacttttaagcaaccagatcttgtgagaactctatcacactatacagtaccaagagggagatgatgctaaaccatttatgagacacctccaacactggggattgacttgacctgagatttggtggggacacagatccaaaccatcctcaataagtaatacatgaatagctttctcgttgtaaaaaaaaatcagtagtgcagataaaattaagaacgtcattgattatcctaccctcgattcccagtaaccagagataatgagtcataactctttggatactcttgtaggtttttatttatgtatttataaaatacgtgtctaaagaaatttgtaactccattttcagatgtttgcatgcaagcatttaatagaaatgatgtcatgtagtaagtaccgttgcagtatcttgctttttaaaaaactaaatgtcttgtatgtcttctcatatccatacgtatgaatcttgattatatatttttaacagctacatagtattacctaatgtggtggttttaaaatttgtccacaaattcttctatacttccttttgcaagaggtggagcataattcctctcttgtttattgtcagttgaacttaatcactgtcttctaatgaatagaacaaagtagaataatagcatgtaacttcaaagactagatggtaaaagaaaggcattgggatttcttctttgctcttctttcttgaatctacttccctgggagaagccagctgttatgaacgttcaacagctctatggaggtgcccacttgaagaggaacggaggcctccctccaacagccatgtaagtgaagaagacttcagtcccagtcaagccttcagccaactgcagccctagccaacatctttactacaaactcatgagaccatgagccaaaaccacccaactacccagcttagccattcacaaattcctcacccataaaactatactataataaatatttgctgttttatgtcattaacttttgggatagtttgttacataacaattgataaataacacatctagtatggttttaattgtctttattgatccattcccatattgataacacttatatttttgtattacaggggtactagctgccatccttttcttatttctgattgtaagaaaatggttctaatatttcatttttaggtatgacactttttgctgattttgtttgatactttttaccgggttaataaaattcccacaatagaccaaatttggaagcaacctaagtgtccatcaacagatgaatagataaagaaaatgtggtacatatacgcaatggagcactattcagccatacaaaagaatgagatcctttcatctgcaacaacatgaatggaactggaagtcattatgctaagtgaaataagccaggcacagaaagacaaacattacatgttttcacttatatgtgagaccttaaactcaaaacaattgaactcatggagatagagagtagaaggatggttaccagaggctgagaatgtagtgggagggggagggggagatggagatggttaatgggtacaaaaaatagaaagaataaataagacctagtatttggtagcacaacaggctgactataatcaacgtaatttaattgtacatttaaaaacaactaaacaagtataattagattgcttgtaacacaaaggataaatgcttgaggggatgaataccccattttacatgatgtgactgttatgcattgcatgtctgtataaaaacatttactcagtaaacacatacacctactatgtacccacaaaaataaaataaaataaaattccctcataacttcagtttgctaggtctcctacataaatgataaatgaatggtaaattttattggcttctttttctttacttattgagatgaccaattttccaaacctattaattggtggaatacatgaatagattttatattaattaaggttaaaaatacttgtgtttctggcatatatccagcttggtcttgatgttttttatacatgtatagatgtggtctgttttataattgaatcaatttataatttttaaccctatgatcataaataagattgacctttaatcttcttttgttgtctaaatcaggttttggtatcaagataatgataatctcataaaatgagctggggctataccctctttattctctagaaatttccttttaaatagggaatttttaaaataggtttggaaaaaatttgtctgtggttttccagtaagattttttgttaataagcttctattttgagcttatttttgatttatggaaaaattacaaagatattacagacagttcccatatatccttcactcaatttctccatctcatataacatcttaacatctcatataataatattacatttgctaaaactaaggaattgacattggcatattattatcaactgaatttcctatgatatgtagaatttcccagtttttattttgggttctttttctctttcatggtctaattcagaataacacattgcatttaattatcatgtctctttagtcccctgtggtctgtgcaagttcctcagtctttctttgttttccaagacctcgacagttttgagtagcactgatgaggtattttgtagaatgtcccccagtatgggcttgtctgatgtttttcgcttgattagactggtgttatgggtttttgaaaagcatgccacggagatgaagcatacttcacataacatcatctcaaggcgaaaggtggtatccatgtgatatcactggtaatgttaactgcatgccttggctaagggctttctactgtaaagtcactatttttctctttcatatactattttttttgaaccaaatcactaagttcggcccatgcttggtgggcaggggaattaagtttggcatcctgaagagggggcagtatctacatatattatttgaaattcttctgaaaataaatttgtctattctcttccatttctttgtttattgatttattcaatcatttgtctgtatcagtacagactcctgtatatttatttacacttcgggttataatccaatatactttattttgtttctcccattgttccactttaggctattgggagatctttcacgttggttcctgtgtctccttgacattcccccattcttttattctcttgagtacttccttatttcatattactactgatcctccaggcttgtcttctcgtttcgctgccccagtcctagaaacaatttcttcaagaaatctttgttccctttttttgaagaatgctatttagaaagcaaattctggttttagggtgtgcttgtagctattgggttgctattatttctgctctgtgattttttgtaagcagctttattgaaatacaattaacatgccatacaaataaactattttaaatgtacaattcaatggtttacaatatattcacagaattgtacaatcaacattaaagataattttaggatattttcatcacctcaagaaacgacctcatgcctgtgttgttgggctaattaaaaagaagaaaccctgtcatatttgtgtaccacttctttattttgcccttcccttagctctaagcaaccactaatctactttttaatctttacagatttctttattttgaaccttcttatggattgagtcacataacatggggccttttgtaattggcttctttcacttagcatatggttttcaaggttcatccaagttgtagcatgtattagtacttcattccttttttggatgaataatatttcattgtatggttttaccacactttgtctattcattcatccactgatggacatttgaattcttttcacctttttgctcttgtaaacaatgctggtataaacatttgcataactttctgtgtagatgtatattttggggtttatacttaagggtagaatttctgtgttttatggaacaatatgtttaatcatttgaggaactcccacactgttttccaaataaactggacttttctatatttccactagaagtgtatgaggttctgattactccatatccttgccaacacttgttatttgacatgtaaattttacttaatctagtgggtgtaaagtggtatctcattgtggttttgattttgcattcccctgatggctaaagatgttgagcatttttccacgtttgctggccatttgcatgtcttctttgaagaaatatatcatatcatatcatatcatatataaatatctcttcatatactttgcccactttttcatgcatacaagaaatttaaacataaaggcactctcaaaaatggtgaaactatcttgggaggacaatgtgggaggatcacctaagcccaggagttcaataccagcctaggcaatatagtgagaacttgtgtctacaaaaaataaaataaaacaaaacaaataaaaaatggtgtaggttgtagtgaagggaattgagaggagattcataaatgtaatgaaggtatgtcctgaactgtaggccagctagtttatagaaataagatagctgggaggagccttctgtagtcaggataaatatagattatttaaaaattaaaataaacagaataaatatcttggtacatatttatacaatcaatttcatccaggtgtggtggctcacgcctataatcccagcaatttggaagactgaggcagtcagatcacctgaggtcaggagtttgagaccagcctggccaccatggtaaaaccccatctctactaaaaatacaaaaatcagctgggtgtggtgttgcacatctgtattccttgctacttaggaggccgaggcacgagaattgcttgaacccaggaggcagagattgcagtgagccgagatcacaccactgcactctgatggcatcagagtgagcctctgtctcaaaataaataaataaataaataaatatttaaaaaataaatttctttgccatctctttaatatcttgtcactggtattttctaaagaatgtatttttaaatgtgactctttgaataaatttctttcaattaccttcaaaattggtaaactttggcaattattgccttcatttcagttaacataatatcagagcttatttgaactcaattttaaatgatgtgttcaccaaagatatttttaagtacatttctgcttctagattattaatttagtagagaaacattattttttcatggtactatgttccatcacaacttatatacctataatcaatgtaagctaaattattttacattaaaattttaatttttaaatacaatttacaatgtaattcacaataatgtcagacactttattttttaacaaaagaaaattccaaaaggtttacgttgattcctggttttccaggcagttcattgtgtcatttataaataacaaaatctgtgcctcttatttttctgtctgtattggtctttagcatccacgtggaccttctgaacaaagttgaataagagaagtgatagaggattgccctgtttctaacttcagctggaatgcttctaatatttctccattaaaactgttgtacaggccgggcacagtggctcaagactgtaatcccagcactttgggaggccaaggtgggcagatcacgaggtcaggagatcgagaccatcctggctaacacggtgaaaccccgtctctactaaaaaaatacacacacacacacacacacacacacacacaaaaatagccggtcgtggtggtgggtgcctgtagtcccagctgcttgggaggctgaggcaggagattggcatgaacccaggaggcggagtttgcagtgagccgagatcgcgccactgcactccatactgggcaacagagcaagactccatctcaggaaaaaacaaaaataaacaaacaaacaaaaactgttgtacatactttggtttaaagaagatactccttttcaagtagaagaaatgcccatcgactctaagtgaagatttattttaaatcaggaatcaatattggattttatcaaatgttaaacgtttgtttcaacaagttacattaatgcctttcaaaaatattaaaccatctttctattcctgagtgtatccaagtaaatcccccatagtaatgcagagactaggtttcctttaaatgtggaacaaaaagacagacaatctttggtaaagtgctgttgaggtggaagcagaaaagattcctgtgtaacagcaaaagtacagaaaacagactaaatatctgtcaatatgacaagagttaaataaattatggcaacactcatacagtgtaataaattagaatcacaagaatcatgagaaagctctccaattacctaagtggagaaattgccaagataccttgtaaaacccaataggtagtttttgaacagtatgcatagtgtgctagcatctatgaatttaaaagggtttagagaagacaatctataaaatgggagaaaatatccataaactatgcatttgacaatatataaggaactcaactgaatagcaacagtcaaataatccaatttaaaaatgggcaaaagatctgaatagatatttctcaaaagatgatatacaaatggataacacgtagatgaaaaaagttcagcatcactaattatcagagaaatgaaaatcaaaaccacaataaaatgtcacctcaccccagttagggtggctattatcaaaaaaacaaaacaaaacaaaacaaacaaaacaagacaaatgatggtaaagatgtggagagaggggaactcttacacactgtaggtgggaaagtaaactagaattgccacattgacaacagtatgaaggtccctcaaaaaattaaaactagaactgccatatgatccaaaaattccactactgagtatatgtccaaggaagtgaaatcaacatgtcagagagatatctgtatctccatgtttattgcataattattcacaatagccaagatattgatagagacaggagacagccaaatgccacccaggtcattgagcacaaaagatgttctactatgccaggaccccagttatcactgttcatattctctgtatcactgtttatattctctgtaaagttttgattatgaaaagggatttatgaggttagtcttaagctgtagccaatctggtgtgctttgcatgtctttctgtatggttctgccagaaagaggggtaccttaggttggggcgccagcctaggactccatgttcctactgtttaagccagcctggcagactgatcagtagcaaattttgctgcagccctctatcttgttttatgtccttgggagaaccacgtggcagtgctttgttttagcctccaccattttacaaaggcagcctgggttcaatcttggcttagggaatgagttctttctagttagatatctttgtgacctttgccatttcttgattctcttcccctccatgaactgccttgaacttttctttctctgagcacctggaagcttacctttgtaaaatttgaaagatggaaatattggctacttggtgcagctaaagttgggtaataagggatttaaaaggattttcttaaagagtgctcagcttaattaaaagtggatatccaacctataggtatatttaaaaggcctttatgtttttctcttcttggatcttgttttgctggaaaaatgttttttctcagttgactgaactctttctccattttgtctttctactcttaatgcatgcataagggaccctaagataatttctgatggcctgggactgcttgggaaaaacagaaaagatgccatggattccattttggaagagatctctgttttcctcatggacctcctggaattaaaggtggtccatgctctcaaaatgtttttgtcttccagctatacctgtttattaggccctagaaactgcatgttttcttagccttgctcttaaagggctgaacccagacgtgctaattggtcctaatagtccaattaggagactggcaaatgaaaaatcttatagttgctgaatcttctgcctatgtagttatatatgtgttgcatgtgtgacattaataaaaaaagacctctaattaattgacttaaagaaggataaatgtttggatcaaatatttttttaaaggaagataaaagctgtggtaccttttggttcatatgactttaatatttgataaataaaaacagccttaaagattattggtaaaatgcagatgtcatcaaaatgcaaatttgtgcctagggttaaaggattgctttgaattagatgagataaagctaaaagtttaaacaagttgtggatggattgtaaaaattaatcttgcaaaagaaattccatgtgtgaacatactgacaaaattcaaaaaggtattatatagcttttccataaattgagcattgaaataaaagcacaacaaggttcttctaaggcaccaatctgctgtttagcaaaatgtgtaaagagtaataaaaggtttttgcttttttaaaatttctgagtcatcattttggcaaaatgaataatttatggtaatctggaattctatttcatagcatcaagtgttttaaacctcttacatacttaacagacttccccaaatcaaacttcagtttcaaaaattgccttttttgattcctaccttttggatgctacagagggcccttggcttctccagaatttggtaactagttatgagcgttcttaacttatggcaatatagttgtttgcattagtgcaataagaatctattttcttttgcaacaggatgcaattagagaaactggttgttctcccaaggctttgactggaaaggtatgcttccctttaaggagttaaacttgacttgcagagccaataaaagccatttgggaaaactggcctcataccttgtctacacagtctctgtacagggttcctaacctgtggtgaataaagaatctcactttctaacaggcccaggaaccccttgctcttgggacctcaagaagagaggagtttacccatctcacaggtatttgaggatacaaacccatggctgggctcagctttagaaagtcctatctgagattccttgtggaacagagttccatcaaagccaatctaaaatgcctatgtaaaaataattattctttctgcactttatgcatataatcaggtcaagtataagactgaaggctattttgcaaacaactcagtcctatcacgatttgtttttaacaaaaatgagggctgaagagaaagaaattatgtttcaaaacttaaatgtttgccattaaatcctaaactcattagtttttaagttttttgcctacattttagactaaccctgaatattcatgtgaatcaaccagtgatctctgactgcagctcaggaggaacaaaagggatgggtaatttaaaaatcttgattaatattctagttctgagcaattatcctaaaatcctgctggatgaaggaaataaatagatgtcgatcacccagagattttttttttttttttgggaaactaagaccaagggaactaactgaagtcaagcctcatgcatccacatcttagcaagtgtaactacagccaccagttatctgggcatgtcacgggacatcctgttctctccctttttggaggcagactgaattccacaacttcatcttagcatttggcctatgataagaagtctatgtaacctccccaagacacatttttgtcccaatttcaagctttgggtggaagctgtgggaaagaaaactggaggtgagggatccagaggcagacaataacagaagttaaaaggcacagtacaggtgagcatgactaattcctgctgattaagccaagcctcccatttcattgataaagatcatgctaatatccatggaataaattaggtctagggaactcgaaggttactgacagcaggggagataggacatacatgggtaagatggacagtcccaccctctacaccctctaagcccccctgttaacatgggtgaaacccgctttgacacccatggatggcaccctgtcatgcttgctgggactcagggatataagggcagaagaaagaaagagggacccctcactttctctccctcatgtatctcaggtatttgctaggaagaaaaaggaaacagggatgcctgatcccctctttctagatgagtagccattcatcttcagtctgtactcctttcaaatgcatctggaacccctgggactcctttgaaaaaatgccttcttttttttctttttcctcctctgtcttgtcttcactgataggtaattgtgtctccatactataggacactcccctcagatgcattctccaaactggggaaagttaatttcccaaaccttaaactggttggtttaggattgggttcctaagggaaaccagatttttttttttcctgtcaggcttttggcctccctctccctgtgccagttggtaaaaggtcttgggatttttcagctgtccttactccacccttgtttcattttgatacatgttttctaataacctggttggtttcttctcgccttcagtccatcaaactctaaactgtcatgcaaccggagcttcggatgatggcctcttttgccggggactcttaaatagtcctctgagggagatctgactgctgttttcccaaaacagcaccatctgctagtaggaagcagttaagatcggtcttcatccttatccttattctaatggcagttagatgcacttctttttttttttctttttattatactttaagttttagggtacatgggcacaacatgcaggtttgttacatatatatacatgtaccatgttggtgtgctgcacccattaacttgtcatttaacattaggtatatctcctaatgctatccctcccccctccccctaccccacaacaggccccagtttgtgatgttccccttcctgtgtccatgtgttcttattgttcaattcctacctatgagtgagaacgtgtggtgtttggtcttttgtctttgcgatagtttgctgagaatgatggtttccagcttcatccatgtccctacaaaggacatgaactcatcattttttatggctgcataggcatgggcaaggacttcatgtctaaaacaccaaaagcaatggcaacaaaagccaaaattgacaaatgggatctaattaaactcaagagcttctgcacagcaaaggaaactaccatcagagtgaacaggcaacctacagaatgggaaaaaatttttgcaatctactcatctgataaagggctaatatccagaatctacaatgaactcaaacaaatttacaagaaaaaaacaaacaaccccatcaacaagtgggcaaaggatatgaatagacacttctcaaaagaagacatttatggagccaaaagacacatgaaaaaatggtcatcatcactggccctcagagaaatgtaaatcaaaaccacaatgagataccatctcacaccagttagaatggcaatcattaaaaagtcaggaaacaacaggtgctggagaggatgtggagaaataggaacacttttacactgttggtgggactgtaaactagttcatccattgtggaagtcagtgtggcgattcctcagggatctagaactagaaataccatttgacccagccatcccattactgggtatatacccaaaggattataaatcatactgctataaagacacgtgcacatgtatgtttattgtggcactattcacaatagcacagacttggaaccaagtgaaatgtccaacaatgatagactggattaagaaaatgtggcacatatacaccatggaatactatgcagccattagagcagggaatgatagatacgagagacagccaaatgccaaccagtcattgtgcacagggggcttgcccaaacatgtccaaagtgaaaattccatcccttaacacatgtgcaggaagggaaataagttaatgtggagtggctcagactgaggacccacctgtgcactgggagaatgggttggagccacaaggaattcatatcttatgtaagggggaggagcctggcctctccagcttgtgtgtggtggtctggtattgaatcagtgatgtggaagcctgttggcaggatgccctttttttcactgaaagctttcttttaataaattcccttctcctcaccttttaatgtgtccatgtgcctaatttttcctggtcgtgagacaagaacccagattttagctgacctaaggagcaaaaaatcctgtatcagtatagaataaatcttaatgtccatcaatggataaatggattaaaaatgtggtatatagacacaaaggaatactattcagctgtaaaaagaatgaaatcctgtcatttgttacaacatgaatgaacctagaggatattatgttaagtgaaatgagccaagcacagaaggataaataccatgtgatctcacttatatgtgaaacctaaagaagtcaatctcatagaagtagagtggaatagtggttaccaggggcttgggagagtaggggcagaggaacgaagagaggctggtcaatgggtacaaagttacaactagataggaagaatatgttctggcattctattgcgcagtagtgtcactacggctaacaagaatgtgttgtatatttcaaaatagctggaagagcagattttgtgtattcctaacacaaagaaatgataaatatttcaggtgatgaatatgttaattacttagatttgatcattatacattgtatatgtatcaaaatgttattccattcctcataaatacgtacaattattatgtgttaattaaaaaaataaaaccttttttattttattttttaattactggggaatgtatatatatttgccactttcaaactctgtctggaattcaccttattcttaccaccctcattgtggccactcaggtccaaatccccctcatcttttaccggggtcacagagatagtctccagagggtcactgcttctaccttttcactccactgtttgttgtcaacaacgcagtcaggatgtccttaaaagaaaaatcagattctgtccctcttgtgccctctgaagtcttcctactttcttccaagtaagagccagaatccttagttggcttacggaacctcctctcccattgctgtcattccattccccctgatctagccaaactagttttcacagtctcactcaagcacactgggcatgttctcatggggctttgttgtttttgaaagaatcctgttgttcccttcctggacgtctggctcttcccagggtggccacataatagcttccccggtgcctccaagtcttatctttaagtcattttctcagtgaggtctacttttacctccacttctaacatttcaaccactcccacatcaatatttcacatctatcttttctgctttttttccccctttctaacacttgtcatcagttatgtttcttaccccctctctctattcctgcctccctaattagaatgaacattctatgatggcaaaattattttgaggaaacttctttgtttattactgaattgtcacagtgggtgctcaacaaatgtcgttttgaaggaataactgaatgaaataataaatataattaacatttcaggaaaactacaaaggaaactgataacatagttgcctttggggaaaagaactgggtggtcatgttaagaggaagattggccgggtgcggtggctcacgcctgtaatcccagcactttgggaggctgaagagggcggatcacctgaggtcaggagtttgagaccagcctgaccaacatggagaaaccctgtctctactaaaaatacaaaattagctgggcatggtggtgcatgcctgtaatcccagctacttgggagtctgaggcaggagaatcgcttgaacctgggaggtggaggttgcagtgagccgagatggcgccattgcactccagcctgggcaacaagagcaaaactccatctcaaaacaaacaaacaaacaaataaaataaaagaggaagatttctcactgtgtatccttctgcagtatattacaaaattagaatattttacctactgaaatatatatatatatgaattaattcaaaattttaaaaatatttctttaattggcaaccactgttactcaagaagccagcctaattggcttattaattttctgtgtgttgccaattgaattatgaatagtgttccttgattctagttttaatatacatttgtataaggagtgagcttgaggatatatgaatatgtttcagagtcatgtatattttctgtgaactgaatgcatatactttgctcatttctttgttaggttttttttttaggtgtattggtttgcaggaaatcttgaacattagtgataatagatgcaaatatgtttttccatttgttgtttgttttttgcctttgccaatagtagttttgtcatgcataaactgatggttatatgtagttcaatttatccttttttttcctgaaaatggtttattctttcctaaggaacagtttaagtaaaattgcagttatctaatctgtcctttaaagatttgaaagctttttcccatgaaacttatgcagagtgtagctcatgacacctatctctatttcttctacagtaattggtatgtttagaatttttatatgctctggtgtcaattttttaataaattttattttcttaaaaaaattttgagttctcaaatttattttcacaaagtagaacaaagtagttacttgtcattctttaattcctcattgtatttgtggttatttcctcttgtttcttgttttgatacttgagcttactttaagttagataaaagttaatttattttaattttatttccaaaaggaccagatcttgaaattatttgttaattcttctattttatgttttcttttctttcttcttcttcttttttttttttctcagacagggtcttgctctgtcatccaggctggagcacagtggtcctttgatggctcactgtagccttgaactcttgggcttaggctatcctcccacttcagcctcctgagtagctgggaccacaggtgtgcaccatcacacttggttaagttttgaattatttgtagtaacagggtttccacatattgcccaggctggtcttgagctcctagccttaagcgatcctcctgctatagcctcccaaagtgctgggattacaggcatgggccaccatccccagcctattttgttttctaattccttactttctttttaaactaatttatttggttttcttagctttttgtaattttttaagtttttgatttgaatgtctaatttatttatcaatcttttatttaaaaatgttattggagactatacattttcctctgagcaccactgtagttatatttcatagaatttaatactcagcattttcattattgttgattttcagaaattctacagattaagttgcattgcatctttgatcgaataattgagtagagagggttttaaaatttctaaatggctttttgttttctggcttgatattaatttatagttttcttctttttgaaatgtctttctgggctgggggtggtggctcacgcctgtaatcccagcactttgggaggccgaggcgggcggatcacgaggtcaggagatcgagaccatcctggctaacacggtgaaaccccgtctctactaaaaatacaaaaaattagccgggcgaagtggtgggagcctgtagtcccagctactcgggaggctgaggcaggagaataaatcgaaccctggggggcagagcctgcagtgagccgagatcgtgccactgcactccagcctgggcaacagcgagactccgtctcaaaaaaaaaaaaaaaaaaaagtctttctgtttactaatggcttaatagatggttaaatttgaaaaatattgttttcacttaaaaagatctaatttttttctttataatatacagaccatggtatgtattatgaactcctttttatattattttttcttccctcttcttatttactgattgtctgtttttatccttacagtctgaaatagttgaattaaagaattaaaacatcctctccataatgactgtctcttatatatctccaatagtttttgctttatgaatattgatgctatgttaagaagagtcactcataagtgctttgtttcattaatcgcaaagcactttttgtccttctctaatgttctttgtacaattcaacttcttttcttaaagaccacacccatccttccctttcattgacttttgtcagtctacgatagtcagtctttcaaaatcatgttttagttaggttccatatacagaacatttgttttgtgattcaatccaaatgccttttttctattgattgatgaatttagttcatttttatttaatgatatgacccagatttggtctaagttatgttatctactttacgttatgttttctggttttgtaactttaaaatgttaccattataagtctacgtgttttgttttgtgggtgtattttatcaggcattggaaaagtttgaatacttgttctagtggttactttaaaaagtataatttttgcaatcctattatgcttcataatttttctaaattttgtattatggggaaggaataactttcttaccactcatctcacttaattttaattgatcatattatttttatggtgtatattattattcttttaaatatacttacacatcaattgctagatttgtggatcttaatttttatctttgacccctagttgttaaagattatgaactcatgcacctgtattatacagaacgaatcctgaatttccacccagggataaatacccgaggcaaatgtaaagtatagttgttacatcatccagtgtcactgtcctggggacacagaagggaacatctggctaccaagaatggactctggcattctgtctgtttttacacacctaccacctggcctgacttgtgctatgcagatcttacagttatgctaaaatctggggtatggtgagtaagcaggggtgtgatatattttgtgggaggccagttttctcaagtaatgagaatccagcagtgcctagccttaaattctagttatgtagtgcattaatatagcatatcgttagaagcaggaagaaggtaaaggaaacaccaaatacattttctgctgtgccacttcacctgagtttgctgctgatggaggcccagcactcccctagtatagctttaaaaggcaacacaaagcttattatggttgtggcttatccagactcccacccaagtacagcaagtaacaggcagtgactcaatgtccatttaaaaaaatctgagtcttgggccggccatggtggctcatgccggtaatcccagcactttgggaggtcgagatgggcggatcacgaggtcaggagtttgagaccagcctggccgacatagtgaaaccctgtctcaactaaaaatacaaaaaattagctgggcatggtggtgggtgcctgtaatcccagctacttgggaggctgaggcaggagaatggcttgaacctgggaggcagaggttgtagtgagccgagatcgcaccactgcactccagcctggatgacagagcaagactccatctcaaaaagaaaaaaaaaaaagaaatattaaagtgtacatatatttagcaaagaactcatgtccagaatatatgattcaattttacaaatcaacaacaaaattttccaagtaaaaatgggcaaaagacttgatcaggtactacccaaaagaaggtaatccaaattgtcaataagcatataaagggttggtgctgaatatcattattcattgaggaaatgcaaatgacaacccaaatgagataccactacacccccacctgaatggctaaaattaaaaagtctaacaatattaagtgttagcaacaatgtgggttaactgaaactctcctacttgactattgacactgtaaagtggttcagccactttagaaaactgtttggctgtcttatttttatttttttcaaagttaaacatattcctaccctacctgatccatcaaatctccttctagctatgtacccaagaaaaatcagtgcatatgtctcaaaaaacatttgcagaaaaaaatgttaaaagcagctttatttcaaaagacaaaatttcagcaaatgtagtttaatgatctatttggcatttatttgtgatttatgagttgggcagcatctcgtctaaaaatagagaggtgctttgctgtgcatggcagaacagccagttttgatgaggtagcttgaacaggagcaagaaaacaacatagtacaaaaagtggatttgttaatatcaggttacttaaggttactttccttgtaagggttagagcagaggagacttccttatcgtgttgacaaatgctggactgttcagggatttggctgtcatctctcctgacttcttggaaggtcagataaatttagttttgatttgatgacatggaactttagcacaagtgacttaattttggttttgtatgttggagcctagggcaggagctgagtccaaaccaatggcctcccatacattttatttaacaattataatggcccaaactatcaagaactcaaatgtccatatcaacaggagaatggatacactgtgatgcattcgtgcaataaatactgctcactggtaaaaaagaatgaactgctgatacatgcaacatgaatgaatctcagtcgttaggtagaatgagaaaagctcagccacaaaggcatgggtactgtgtgatatcagaagagacaccactaatccatgataatcagaatcagaatagtggcttgttcttggagaggagtggtaaaaggacacaaggaatttttttgtagaaataaagtattttatatcttgtgacatccagtgtgcaatgtgcaatgataatatgcattttactgtttataaattatgtcaattaaaaaaagacaaaaggagaaaagaaaagaataaagtatatgtcccaagcttatagagcacctgcaagaccttgggtttatactgagttctctttggcttcagcccttttcccttcctgttagaacacaaagctttccaggggtcacctggtttgtccctggcactgctgctgggtgtcacctcatcataaatccatccaatgttgctgcacatcactgcttcctggtcctcaggaggctaatgctcctgacaggtgccatctgaccatgtcactacctgaagagctgacctgcttcacaggcagggggacagagtggcacatcagaaagccactgctatgcatttcacctacaattaagtgctaaggaataatagtggggcttttatgctacatgcatgttttcctttccattaaatctcagatatgctgtttgcatatcttagttcaggctgctctgaaatccatagggggaaagaaacccttcattaagttcagcagcactgtccggcaatgcagcagcactcctatttatttttccttctgtaaatatttgtgctctctcaggctaaggagtggcctgtgctagagactaaaatatccccatttatatcctccaggtgcagcaggaaacgcctgacctctcaccctgcccctgcaatgacctcaacctcacttatggggaccaccctctgggctgccctaatgcagacccatgatcacctctccaggttgactgctgaatagcaggagaagatgaacctgaaattgaatggttattgcaacccagttttttcggtcgaaaggtgaaggttacttagcttttgttgctgccttcaagcttgttaatgaaaagatggaaaaacaatattgacatcagtgaagtccaatttgttcagaaatggaacttgatttattatagaaatgagatagaagacaaatgaaaaagtaagatatgaaataagaccaataataggaagaaaattgcaaaaatcttaaagaaatattattactttttctactgagtccatccatctgggttttcaaatttctgcgattcacaagaggatcatgacatgaatgttaatccaaaataagagttcctattgtagctgctgaatgtatttgcctaactatctctcactgttaactcaacttgcagctaaggaaattttgtttgttcatttaataaacatttattgaactgcaaattagtccagtatttggtttatgaatttaatttttaaactttcaattttccatctctagaaatttacttccttttacattttcccaagtttttatcttactaattcgtgtcaaagctgtgatgctcaatgtatttctaagttatcacttacgtaaattgccctatctagcttataagaccatgatgaggagcaaatgaagcaattttgataaaaatatatgagaatatttttcattttgaatacattatttgacttttgatggaaaagaaaaacaccaaagacattaatttatctttataactttaataataagcttataaaaattaaaacaaaaatacaaaaatagaacaaaatagggaaagtgaactaatatgagatcaaattttttttactaaaaaatgtgattgtgaatttaaaaatgcaataaagtatataaacattggatgaaggtcataaacagcaaatagcacttggaaatatcttgtcacattctaaacgtcaaaggaattctcaaaaaagtccaaagaaaaatagtataagccataatttcttatcactttgcaataaaattagaaattaactaaaaagggataagatgggaaaaaaacccaaatcaaatacaaagagattttaaaatactttctgaagtaacttgtagaatgagaacttcaatgatagcctacttatgaaataatgatttatctatccatctccctttctctggatgagagcctgggggagggtagtgagtgacacattcacctgccttcttgcttctatagctcttccagtagctggaaaggtacaatctgcagttgactcttgaacagcatgggggcgtggggcgccaatcccctgtacagtaaaaaatccaggcataactttggactctccaaactactaatagcttcctgttgacaaaaagccttactgataatataaacagtctattaatacatattttgtgtgttatatgtattacatgctgtatctctacaataaagtaagctagagaaaggcaaattttcttaagaaaatcgtaaggaagagaacatacatttactattcattaagtggaagtggatcatcacaaaggtcttcatcttctttgccctcaggtcgagtaggctgaggagggggagaaagaggaggggttggttttgctgtctcaggagtggcagaggagaaagaaaattcacatataagtggacctatgcagtgctaacctgtattgttcaaggttcagctgtatttcattttcttctgcaagataggatcactcgtactaaatactcaaagtttagcccctgaagcctgtatcattcaatctaattacgtaggagaaggaggaattagagactctttttttcaagacaaaggtatgtcttgctgcaaaatcctactcttaaataccagaagctgaacattcattgtttcagtcttcttacctgaattccttttgcaacaattcctaattacttccggggcaaatgggatgcctgacgggaacaggggtgaagattattttttaggcaaaatagtaaagcccgttaagaaatttacaaatattactactattgtacttttttgttagaaaaatggtaacataagaactgaattaaatgaggaagcagaagccagggaataataaaatgaaagtagcaattaataaaacagaaaagaaaaaagtgaaattgataaattagtcaaatgctagtcctttgaaagggataataaaatatataatgttaaggtggaatagtcttaataaaaaaattagaaaaaataggcaatctgagaagcagaagggatataaaatcagatatcaagaagtattaaaactacacaaataatacaatataacactttatgataataaattttaatgttgatgaaatgttcactttcctaggaagtataaattgcccaattaaaaaatcagattaataataataaaacctagttatccatagaaaaaaaaattatgaaaaaaagaggctaaacacagttttacggtcagtttttcttgatttttatgaaacagttacttgtgtgctggaataggctaaatcttattaaaaaagtaaaaatctttcatatctctcatgctagagcctaacaatatataataaaaatacaacatagggaatgagctgtttgaaagagtaaaaatcttgtagaaaaataacaacagtctaggccaggtgtggtggctcatgcctgtaatcccagcactttgggaggccgaggcaggtggatcatgaggtcaggagttcgagaccagcctgatcaacatggtgaaaacccgtctctactaaaaatacaaaaattagccgggtgtgttggcgtgcgcctgtaatcccagatactcaggaggctgaggcaggagaattgcttgaacccaggaggcggatgttgcagtgagctgagatcatgccactgcactccagcctgggtgacagagtgagactccgtctcaaaaaaataaaaaagaaaagaaaaataacaacaatctaaataaagcagtacattaggaagacaattatgcgtaaccaaacaggatgtgtcatgagactataaaggtaaatatataatagaaatatataatagaaaagctgttaatataactactcacaatgcaaattcacagaattctatgatcctatatataaatatcaaaatattatagataaaattcaatattatattgaaatattgtagataaaattcaatatccacaactgataaaactttttgtaatctaaagaaactttcgaacatcacagaaaccatctaccttaaattttgtcatatatgatggtgaagtgtggtatgtggtgaagtgcgatacatgatatgatggcgaaagagtgatatgccttttcaagtcagaagccagataaagatgctttgataggagcaatttttcttaatatttttctgaaagtttttttaatcaattagattaaataagaaaacaatatgaggagaagttataactattgaaaataaggacagaagtttttatccattgataataggatagcataccagaaaaattcaaaatgaaatgaaaagtacctgaagatagtaagcaaattcagaagattctgggagtaaagaaatagaattatagaatgaaggacatcaagcaagaggggagaaatcacagcatgtttgtatgctgatgggatgatactgaacagagtgaaaactgagtgacatagaagagaattgattggaaaacatcacaagcatgaagagggtgagaaggaagagagaggacccagaacctcatggctcatgccaataagcacatcaaggatgaggcagacagaatcaccaacagaagatccaatgaggttgaaggaaaacccacagcatgcggtcacagaggccaggagaggaaatgttttcaagagaggggagtctattgctgaaaggttggaaatgtggaggccagagaaggttgtggatttttcagcaggaagatatttgatgtcttcacaggatcgtgtgatgtggtgaaacaccacaagaagaatcccatctaggtaggttaaatagtgagtgggaggtgagtatgtgtgatcggtaattgattgcagacagcccttccagatattttgatgtggagggaaagcaagattatgaggatgcgaggttttggaaattttttttttccaaagaggatggaaactagatcatgcctatttgccaatgaaaataatccaggagggggtcaattaattgtgctgtagagaggggatcattgctgaaaggaaatatttgagaatgggagagagaatggcttctgcataaatggctagaaaaccctgttcttagataccatgatacatgttactgccaaatgaacctctgcaaaataaatagtagttttcaattaaaattttaacacttaaaatgtttaatttgataaaattaaatgcctgaaaataggtaagatgatttggaaaaaaaaagtcataaagagagtgttgctctaacatatattaatatactttataaagtttcaattattttataatgtaaggaataagcaaactggtcagtggaatagaatagaattctaaaatagaatttctagaagtgagtctcatataataagttagcacgtgtcaaatcagtggagaaaacattattcatttaatgtcatctcactccttgttgactcccaactggtgactcattaaaaaaaaaacaaggttagatcacactgttaaatcatatgttaaaataaattccagatagatttatgctttaatgaacactataaacatgctaaaataaaacacagtgagcttctaagcatactttcaaaggcaaattgagttgtaaaaggactgataggtggattatgtaaaaattaaaatcctcattgtaagatccaaaaatggtaaagtctacatggctatgaaaagcatactgtagaaaagcattttatgataagggtaaaataaattacaaaaataatgtatttctaagccacagactaaaagattatgaaagaactttcttgtatgatccttattttgcaataaaaatatttgtatatgtacacagcaaagactggaagaaagtatttttaaaaattaagtagcctagaaatgcaagtcagagacacttttcatatttgctcatacacttcactgagggttaaaaatattatgaaaccagtagagagaaaggatatgtctcagtggggaagggtcctcagttgtctcctatgcctcattagaacacagccagggtagtggagatggtcagtgattatttggtgttatcagatctgtagagactcgaacaagaggactccaggacttttattgtttaccctgctggaatggctacaccaggacccagaaacaacttattaccatggcaattttactgcttaaaaagttattgcatgtaggactaatgtctgagttctgagttgttaaatacttggtggtttgtatttatgtaactaccatttgctgtacctgtaccatgagctatggttcttccttttgtgtgtacctgtttcaggacctagaaatttttattacttaggggcttcccacgtgcagatgtgcccatgagctacgaatgtgtgatcttcagtccagcctaccatctaactcaatactcatattcctaactgattatttaacatttatacatagctgtcccaccatcactccaaatacaatatgttcttcatgttcttccccaataaaattgcttacatatcctaatttctctcttttcatcaaagatttctattgctcgttttgtaataagacttggtatcttggtattatacctgctttttaaaattctcttgtcccctatctccaagcagttctgtccactactgtttatttgtttgaaatctcttcttggctgggtgtggtggcttacacctggaatcccagcactttgggaggcagaggcaggcagatcacctgaggtcaggagtttgaggccagcttggccaacatggtgaaaccccgtctctactaaaaatacaaaaattagccaggcgtggtggtgagtgcctgtaatcccagttactcaggaggctgaggcaggaggatcgcttgaacatgggaggtggaggttgcagtgagctgagatcatgccattgcactccagcctgggcaacaagagtgaaactccttctcaaaaaaaaaaaaaaaaaaaaaaaatctcttccctctgattctcactgtttccacttcagtctcgtatctcacaactcccccaccccatgtaatattaaatgctttgtacttccattctccttattcccctaactggggtggttctatacttaggtagagtgggtaggaattttcatggcactgaagaagccttctacacccaaaactctcaagctcagttggctagaaattcatcactgagtgcccactccattgatatctagctgagaagttgcttgtgatcaccattaactaaaaacgatacaaggtgatcatgtactctggacagcttagcatgaagaaaaaaataaaaatagggtgaattgaagaattcagaacttcaccttacatagtttggaaatgccatggaaattcaccaacttgatgtttgtttcaactttaaaaaccttaacacaattaactttgtcagtcatttacattttagagtaaatggatttcttaggattttttggaagagctagttatgataaggttgaagataaaagtaattataatttagtgttggagaaaagaacactatcaaaaaggaggatgaagaaagagtaaacttgaagagtagtctttttattctacacaactttaaatgctaataataaatattgaattctatttctattcaatcaacaagtatctgataaggtgtgccttatgtgtctggctctgttatagaaactggaaacagagaagtaagcaaaacagacaagattttactttcttgaagtttatactctagtaaaagaaagataataaacaaatacataattagtaaacaaacaaataaatacacaaactaagtgaagataatgatacttaatatgaagaaaataagacaaggtgctatgatagccacagaaagtggtcaccaagtggactggatggtcagaaagggcctctcaacagagcttatttttagctgaaacctaaatgacaagaagacaccagtcatggaaagatctgaaataataacactacaaagagggagaatagcctgccattgcccaaagatgggaaggagctcgttgggtccaaggaggaggagaaaggcttgtgtggctggagagaaagggagagaggcatgtgatatgaagtcagtggcaatcagatcatacagagttttgacgaagatggtcatgaatttgttgtattattttaaatgagtcgagaactccattgaagggcttgatagtaacatgacatgctatgatacggactttgaacatagcacatgggctactgtgtgaagaatggattgttgggggaaagatgacaactactaagtaggctatcagaggaatctaaaggagggacagtgatggtttggctcagaattgtggaagtggagtctgaatgtggttggatttcagatataatttggatttggggtattattcctgcaaaattagatactggttgagaaaggaagagggatcaaggatggcttaatgtctttctttgagcaactgggttactcactctctgagatgagagagatggataggagtaaggaaaaataaaaagttttatttggacatgttgagatgcccacttgacattccagtggaaatgtcaggttgtaggttatgtgtgcctggagctccacgtagaattcacgtccaaatatataaatcagagcactaccagcttattaaaaacattagactgggtaagattgcctagtaagagtggagggaggaagtagagagacagacagagagagaagagaaaggaagaaaagtagagcttcaggttcacattaaccttccaaaaatatctttttttcttttattagggcgttttcctactcccttgctcaaaggtctccaaagcttctatattaccattagaattctatttactttaatgtttaaaatgccgaatgaaaatcctatgtcctttccaattcttctagtccacactgacctttccatattctggcagtttttataccctttggtatactgaagaagcaacactgtctaaagtaagttctggcctttcttctttgctactgaagatgatctgtagcccttagaaagtcctgccagatagaagtgtttatgtttgcctagctacagatctaacaatgtgattaatgttaaagcctttaggccacgtgatatcagttctggcttctagaggaccagggactaaagatattaacttgatttccaggagggctggacacaaagctcagtgtattagtcaggtttctctagagggacagaacgaataggttagatgcatatataagggggagtttaataacaagtattgactcacatgatcacaaggtgaggtcccacaataagccgtctgaaagctgaggagcaacaaagccagtccgagtcccaaagctgaagaactgggagtctgatgttcgagggcagcaagcatccaacatggcagaaagatataagccagaagactaaaccagtctagtctttccacattttcctgcctgcttttattgtggccgtactggcagctgattagattgtgcctattcagatacaaggtaggtctgcctttcctagttcactgactcaaatggtaatctcctttggcaacacccacacagacacgcccaggaacaatacttcgcatcctttaatccaatcaagttgacactcagtattaaccataacagtcagccatgcaggcaatatgggcttgggcctcaatacaaactgtggacaccaaggacctgcctggacttccctggctgacaatactccctgcatgtggccaaacgtagtaggaggagttaatgttgtctatgactccatggggaaaggaggactagaactctgtgtattaatatttcctgggcactgcccaatgtgtctcttctcttggctgattttcatctgtgttctttccatgtaataaatcataaccatgagtataaacagctttccatgagctctgtcagtcttttagtaaattatcaagccagagggaagttttgggaaccctccttatatggtttagctgtgtccctatccaaatctcatcttcagttataactcccacaattctcacatgttgtggaaggaacctggtgggaggtgattgaattatgggggcagggttttcctgtgctgttttcataatagtgaataagtctcatgagatctgatgattgtattagagggagtttccctgcacaagctctctcctcttgtctgctgccatgcaagacatgcctttcacctgctgccatgattgtgaagtgtccccagccatgtggaactgtaagtccattaaacctttttttttcttcccagtcttgggtatgtttttatcagcagcatgaaaactgactaatacgcctccaaatctgtatttggtgttagaagtgaggacagtcctgtgtggggacttttctctctaacttggtagttggcataactctttgcaccttattttggtagttaattaggtttctattttctttgttatttagctattttatgtgctttgtgtccttctccgtgggagctgatctcctatagggcacttatttctttcatattctccttaacacctagcacaatctggggactcctagtatttacattcatactcgtattgaatttaattgttgtgttgagtcattatcttgctttttcttttacaaaaataattgtgtattgctcaagaaatacttgggaaaatttaatctttatttaatttcctttttgtgtttactaaaatgagggcattttctatgtgtgtttgaccaaaaggaagatataggagggaacaatttttcagaatgtgattttctattctgtttgacctccactgagtaaataatgtactgcaatgtcctgatgcataggctatagatttgggggcctcctgcaacactatgaagagccccagaagttcagaaacaggtactgctgtgtttggaagagaagatccttcagggagaacccttgagccctgaaaccaaacagttctctgtttggtgtagttgtacttgtcctgtaaacctgttctctccaatatggtggccactacccacgtgtggctactggatgcttgaaatatggctagtccgacttgagatgtactgtaagtataaaatgcacattggatgttgaagatttagtaacaaaaagaaagtaaaatgtttcattaatgatttgtatgaactgttctcatgttgagatgataatactttggaactattgggttaaatgaaacaattattaaaattaacttcaccagcttctttttaccttttttttttttttaaaatgcggctgctagaaaatttaaaattacttatgtggcttacatatttgtagtgcatcatatttctgctggacagtgctgatctaaactctgaaacagttgcttcctatccagtcatgcgactggggcatttatctttatttccaggtggcaataactcaaagcctgcaggacgcaaaaagttctctccccttgtttgggtgctaggaaagaatgcacagtttccctgcctgcttttttgtttctaatagttattttctttatggaatttttaagagatagggaagatgaaggaaaagagtgagatctttgttttcagttgtcatccttccagattttcttgaaaaaccatctctagaaacaaaagtttgagacgcatagcgagaacttaaaaaaaaagtctagaaatcatcttaaacatgtcaactcttctaagacttatctaaaatagaagcttcaaaaatgttacttattttcccccttttaagttttccgaaaaatgttccagagccgagattgcatatgccaagactttgtgaaaaggacttttattgcaaagttactagctctgagaatttggctttaataaagaatccacataaccttccatgaaatgtcaggaatgtgctattttagtaataaccttacctgtgtcctagggcacaatgaatgagaatctccataacagagaaaaaaataattgagaattggcaggtgaaatcatctagtcatgatattaatgatttcttcaaagaagaagctggctcctgactttatcaaaaactcattaaatgcttgccaattttataaaaggaaatatctattttatttctctaagtatatagagataaggagatttttaaaatatataactgcagaggctgtctctggacaagtttaacaattactagtaaataaccagaagatgatatgctagccatggccagatgtgaacattctgcacacaccccttgtggtgtgcaaatggttggtcattttctggtggttatcaactgtgagtggtcctgaccctcacaagtgcagcgagtttaattatatcctgttttaaagccagtttagtcattcaaaatacatttttaaaggcttccaatgtaaagcataaaaagaaaaaaaatcttttaaccataatttagtaattctccagccttgatttttggctttccttgctgcctaagtggtcatatattttataagccttgctaatttgctgttaaatttgctatttatatgatcctagatgatttgttggacttcattgaacaaaaaaagatttttattagcagccagtgctttcaaagaagtggtttttttcacaccatcaaggccactttctcaacttattgacagctttatgagtgtagctggataaagaacagtttcctgtatccaaaagcgttttgcattccatggggcaaaaacttggacttttaattaggatatgagagccttcctttctctcccaacattccccgggggcacagagcagtaacacttgcatttagatagttaatcacttttccagacttcagcccactgaaattaggaaggtttttaggtcaaatgcttacctggctctcagccagcctaggatggtatttatttctgcacatctgcattttgtatacatacacacactgtttctcctttctaactaattgagggtattttgcctactgcagaaactgtcaaatgaatcctctttagaatcttatttgaacctgcatttgatatttgtcacaagagaatgaaatatattctagacttttcccatctgagatagctttctgcattcccctcattccctcattcttgtctgacctcactatccagcatgtttagagaacttttaaggtttcatgtatctgttacatttttctttattgttataatcctacccagtacaacgtttttcctttttcaacatggtattagggctttgattgtgaaaacaatgagacaccaaacagtaagtgaacattttggggttcaaagtggtagcctggttgagataatttggtagtatttgtgtgtctttctaccctttgggggaagcacatgcctccagaatatgccagttggctggcttgggtttcttgccccatccttgcagaaatttgctgtcagatatgcagactaaatgggcttctgtcgggcatatgaaaaagcataatcttagagtcttgactggtggcattgagttaataataaagacactaggaccagttgagacctagttacttaagaaactggtaggtttttgatataaagatgcttcttaggaaatttttctgagttgcccatttttttgtttattttgtaactatcttgagaagactgaaaaatgaacaaaaattaacaacccccactctgcccaaaacatgggtttttatccattgctcaaaatctggtgttttagcaatgccactggtaaacttctgccaaattttactatgtttgagattgtaaaatagagacctgccatattatctcaagattaagatatgcatgcatctgagtacctggcaataattttattattttttttttattttagatttaggaggtacatgtgtagatttattacatggctatattgcatgatgctgagatttggagtatgatttaatcacacaaatagtgaacatagtacccaataggtagtttttcaacccttgccctcctttccgcctcccgacatttgaagctctcaatgtctattgctttcatctttatgttcatgtgtactcaatgtttagctcccacttataagtgagaacatgcagtatttgggtttccatttctgtgataatccacttagaataatggcctctagctgcatccatgttgctgcaaagaacatgtttttgttcctttttatagctacgtagtattccatggtttatatgtaccatattttctttatctaattcaccaaggataggtacctaagttgatcccatatctttgctactgtgaatagtgctacaatagactcaagagtgccagtgtctttttgtagagtgatttactttcttttgggtatatacccagtaatgggattgctgagtcgaatggtagctttgagttgtttgggaaatcttcagactgctttccacagtggttgaattaatttacattctcacgaacagtgtgtaagcgttcctttttctccatagcatcatcaacatttgttatttttagactttttaatagtagccattctgactaatgtgaaatggtatctaaaattcatatgggaccaaaaaggagcccaataggaaaaataatcctaagcaaaaagaacaaagctggaagtattacattattggacttcaaactatactacaatggtatagcaatccaaacagcatgatattgatacaaaaagagacatatagatcaatggaacagaatagaaaacctagaaatcaagccatatgcctgcaatcaattgatcttcaacaaagtcaacaatggagaaaggacactctattcaataaatgcaaactagatatcaaaggaacatacctcaaaataataatagccatattatgaaaaacccacagctgacatcacattgaatgggcaaaatctgaaggcataccccctaagaatttagaacaagacaaggatgtctaccactctcattattcaacatagtactggaagtcctagcccgagtaaccaggaaagagaaagaaataaaaggcatccaaataagaaaataggaagttaaattatctctcttcactgatgatatgattctatacctagaaaaccctaaatattccaccagtactcgtagaccaaatgacttcagtgaagtttcaggatacaaaatcaactcacaacaatcaaaagtttttaactatcttctcatgctttttatttccatcttatcttccgtgaacacacctacatatacacacgctaacacacaagcattcgcaacatctaggcaatttacaagtagcaagaaaacccaaactaattctgaatgtattgctctatgagccatttgcttagaatgtgctgaccactgtgttgaagtaatgggaaaagtcacaggatgcagtaagcacactgaacacattctgatttagagcttggctgtatcaattatttgcacaaagcttttagaatgccaatatttgcaactaagacaactaatgctgagggttagtctgtttgcttttttaacagattatggtgaaagttagatctcttctaatctgtgtgaaatacatattttcttcacgggctactttatattgataatcacagagcctgaactccagcatctttgggggaacccactctgctcttcttgaaatcaataagatagtaaaattgaattttaatatcttccatttctacccttacgattctggcaattacattttttttcttcctggtctatgcaatcactctgcttgctctatttttagcaacttatctcctggtgtttccttttctgctacaagttccttctctcacacaagggtgatcttcatcctgtagaaaggaagtcaacccaggagctagggagtctctggttagctctggcccctattagctgtgatgacttaggcagatcagttcctctgggcctcaagttctttactcacctagagaaaggaattagaccaaatgtttcctacggtacttcccaactgttaaattttgctatcccccaaaggcagctgcatacattagaattcttggtgcagaaataggcctcaaggaacagtacatctagactggtttcagaacttcactttccaccattttgctatagggtgtgtttcagaaaaaaactctgaaactgtgttgtcctctgttctcaccacaacaacgatcaacacagaagacttctgtgtccaaacgtggagatttcctccccaccaaaaaacatgcagtcaattgtgcagcagacaccagctgagtgtcttccaagtcaatcccgacgttatctacctggatcccacaggttgagggctccatacccaagaccaacccctccctcccaccagtcatcagtctgggtctctaaaacttttgatgtcttcatttggctttacattggggttcccatgatcccctctgtgggttcagttaatttactggagcagctcacagaactcggggaaacacttacttatgtttaccagtttattacaaaggatattttaaaggatacaaataaacagccagatgaagaaatgcatagggcgagatctggaagggtcctgagtgcaggaacttgtgtcccagtacagctggggagtgccaccattctggcatgtggatgaggtcttgttagctgcctgtccactttcacatgttcagacatctggaagctctctcaactctgtcttcttgggttattatgggctttatgatgtcagcattccttcccatacgatatagagcggtaccctggaatgacggtcatatgacacacaatcacaaaggcagggaaagatcggagtcctgccttgggtcaggaaaaggaaaagcaggagaaggatagagaaattatcttctgagacctaacacacccagaattataacaaaagaccgtaacaacagctataggagttatgagccaagaccctgaatgaaaccctatgcatatctcataatacaacagtgccctagaagattcttgtagccaatttaatacatttgatgtatgaaatattttggaaatttttttaagattccatctatgtatttcactttagctcttggattttttggccttcctagtcaaacagtgcacacttttcttgttttcttcctttttcctctctttttttctctctctctttccatctttcctccttccctccttgttcccttccttccctcccactcttctttctttttccttccttcctttctcttttcctttccttctttctttctcctccctccctttctcctccttccccttccctttcttcctttctttctctctctctctttttctttctttcctctctctttctttcttcctctctctctctttccttcctgccttccttccctccctcccttccttcctgccttcctgccttctctctctttcctttcttctctctttcttttcttttttctttctttctttctctctctctctccctccctccctccctctctctttctttctttttctctctctctctttcttttctttctttcttcctttctttctcttttcttttgttttatttctccctcccttccgccctcctttccactagtgacaaaacaagctattccctcttcacttgcttcatagaaaaatgctccttgactcactgtcccctgcttatgctgatatacgcagccatactctccaataaacctacatacccttggattatacatataggagaacaattgctacctctatatttatatagatatagtgcctaggtgtgtgtgtgtgtgtgtgtgtgtgtgtgtatgcacatgtgcatgtgaggaaagaatgcagcaggcttttactccttcacctcatcccaattttctgctatacagtttaatgttgggtgtgcaaaaagatagtcatcactttgttctagatatctgtattagttatctattgctctgttacaaattaccccaaaatgtattggcttaaagaggtgaatcaataaatccagtccatactcaaggggaaggcattacacaaagctatgaataccaagaagtaaggatcactgggagtcattttagaggctacgtatctcaggtctctagtatctaacaatttatgttcctcccacatgcaaaatacattcacctcctcccaacgtcttgaaaagtgtgaactcagagtctaatatatcatcatctaaaccaggttctggtgaagaggaggctcctggggtgtagtatcttaagtactgctctttgaatatagttactcttggtcagtcgacctgagaaactaaagagacaagttatctcacttccctgtgcccaacaaacaatggtagtacacgtatagaatcattgcaataggcattcccattcaaaaggggagaaaatgggaggcacaaaggaattactggtccatagcaattctggtccatagcaattacttgtccatagcaattctgaaactcagccaggcaaatgttggaagtactttaattcaatttcatggagtgggagattttctgtggctcttggctctgccttctggagtgtttgttctgagtcatttcttttccatgaaagatagcatatgtttatagctgagagactctttcaatctgcttcctgccaggagaattctaggaacctaaagatttggtcttttcccagaagaagccatttcttaattttaaagccatcacttgccattgggaaggggtgagacttttcaaaatcatcaagccttagttccttgttatttaagagtcctcttctcaatttatctctctcacattttaccataatcatcaaggtgaaacaaacggcaacctcaacgatttgcttagacatatttgctatattaccagttgattaaccatgttgtcctctctctacataaccacagacaacagtgttgctatactctctgccccttcatagcaaacatttttcttactccagtttccagtgagattttcttcatttttcttttctttcttttcttttcttttctttttttgagatggagtcttgctctgtcaccctgactacagttcaatggagcgatcttggctcactgtaacctctgcctcccagattcaagcgattctcctgcctcagcttcccaagtagctgggattacaggtacctgccaccgcacctggctaattttggtattttcactagagacggggtttcaccattttggtcaggctgcttcatttttctttaagccttcaactgtagtatctccaaagattaatagtttcttccaagtactttcattaacactctccataaagtccactgcctgcttccaaagccattcctacattttagagtttttggtttttttaagcagaagaacaattgcaatattaaggattgaatggacctaaagagaaatattgctgtggctctccttgattaaagtgctcagcaagactctataacttttctggaagccaatagggctaagataaaatttccaagtatctaggaatgtttaatcttgtactttctgagggaagggaaataaacttgctagcctcttatgtttccttatgcagacagactcaaggattctggaatagcagctcattgttctttttagattttgagatttggcaggtttttctgagaatgctttgactgtgggtagtgattaatgtagaccatgtctatttaaggttttggccatgtcagacatttagactgagggtggcataaccaccttaggactttcccaaggctccagaataaaggatagaataaaaccaggaacttttctatatttgacagacaatggtatgcttcttacatttacccatttgtcttatgttttctcctttttttggttttacatacgtcacacatattcgtgtacatgtatctctgtatatgtgttaagggtggctctggtggtcagaaattcacattattaatagttcagaaataaataattttgcttgagaagttacctaggctttcatcttgtcaatagtagccttcctaacgttccttcaaaaaaaatttatgcctaagctcttcctgcttcaatatataccaatgtatacatcactatttctatccaataatgtaaatgttggttttctaggcatttcttttaagaatgcagtgctactggggggtgtagcaaaaatcacaactatttgcccagtaattcaggcaatttatcttcaactggtttgttggtactgctcagaatcttctcctgaaataaacctcatttggtttgagctcattgtacaatatcttcctcccagccacaattgcaaccttttttctttcaataaatatttattgaacacatactatgtgctaggtataaacactaaccaagagagttatgatctctgctcttagagagtttagcatatagtgaaaatgtaaaaatgaaaataagtataggatgaaaataagtataatgtgataaatattttgacagataaggaatatgtgtggtgggcaagaataatgaggaatgtcctgcttacaggttagttaatcaggaaaattttcaatgaggagaaaaagatgaggcaaagaaatgctgagccaactgtgtggctggagtgcaaacagatacagggttgagaaggcttgttgcactttgctaactccaagcaatttattgtgtctggaatattgagtctaacttggggagtggcgagagttcacactagaaatgattgacagagtacgatcatgcagtcattatacactatgtgaaggaatttggattttatgtgaaggtaagatgaggtgacttaaccaaacatatatttggaaataatcattctgataacagcagtgctagacccaggttttgtggggcctgataatgtgtaatttgggagctctctttaagaaaaaaaatagaatgaatttaaaaatacaaattaagttcgcagtgaatatttgtttagaataagaaaacataacaaattacaaattttaaactgctgagacaaatcagaaaatccagaaaataaatatgttttatgactttattgccagcacacgtctgttgtctataaaagattttcccctgccgtgtgcggtggctcacgcctgtaatcccagcactttggtaggtcgaggcaggcagatgacaagttcaggagttcaagaccagcctggccaacatggcgaaaccctgtctctactacaaatacaaaaattagctgggcgtggtggcgggtgcctgtaatcccagctactagggaagctgaggcaggagaatcgcttgcaaccggaagatggaagttgcagtgggccaaaataacgccactgcactccagcctgggcaacaagagtgaaactccgtgtcgaaagaaaagatttttcccctatgtatgtagataccagaccctcttattcacttcttcatagggcagtgattttgttctatcacttcccattgacagaatagaaagataatgtagtttttcctccatcatgattaatagcaatttgattattattaacagtttattatttatctatgttttttagagacagagtcttgctctgtcacccaggctggagtgcagtggtataatcatagctcactgcagcctcaaattcctgggctcaagcaatctgcatgcttcagcttccaaaatacctgagactatagacacatgtcaccatgcctggctaatttttcttattatttgtagagacgatatcttgctatgttgcccaggctagccttgagctctggccttaagccatcctcctgccttggcctcccaaagtgctgggattagagttgtgtgccaggatgccaattgttaatagtttagaataattttttcaccttcacaattttttggttgtgttatacagattttccagtttgtctgccaaatttgagaaaaccactaaaggagtattttacatattatgaatcataagactttgatttggcatatcaaggtatcttaccttggcacatttgaaaaaacacgtggccatagaaacatactaagaagactctgcaagtctcagaaggggctagtgcaagcaagggaccaggaaactcaagtcttagtggctttagagcacttctgctgctcaggagccaaagagaaaatggaccaaggagatgttgcttgaacacagtaatctcagtggggccatgggctaaggcatgttactaggaatgaagaagaaatacatatttgatttttacatgtctcctttaaggaggaatataattgataggatttcggtaattgacttttcgtaggggttatgcaaggtggaaagggagcaaacagggaagaccagcaactttctggcttgagtcactggaggagctgatgtcattgaggcttgaaacatgactaggagataagatctgtgagtataattaaacttgagggtctgtgtggtaattgagtcagcaacgtgggtctggagagcaacctgggtgatggtgaaactgacggggttgagaaattgatggtgccatcaatcagcggaatgttggagctggagtcagggatttgcccctttgctgcagccaaagaagccctataattactgaaagccaggctgatggccctagaagtatcatagaggcttggcttgcggcaagccctacctctccaaatgtgctggctagagtatctcatccactgtttccactgccaccaccacaccctcttgttaaacttgatttaatatgtctcacgacaaaaagccccgagcacaaagttcataggcttttagtgggctaactgtctcagtttacagtcaggtaacaaatcagggcatttttttcccacttctgtaagttctagttgattctttttatcatcttttctgcctattataaccagtctttttttccttactcatactctcttattctgacttattccaaaataattttaaacattcttacttatgttttgtgtctgataaaaacaacctctgaagtcttttctgttctactgttctttattatatcggcttattctcactcatggtgtcttttttgttgtatgctttgtcgttgttttctagtttagttttcattttgaccttgtattcactggaaatttctcagtactacagtaggaattctttgaggtctgcagtgggaacaaattccctgaaaaagattatgtttgatcctgcctggaggcactgtgaattcctggaattactttagactaacatctcgatttattagttactttgcttgtttttagaatatgtttttagatttccaaaccaagtaaaagccagcccacagttgcaaattatgaagggagactttttctctttacccaaagacaaggtagtagtaggaaaccgtctttgctgtctttcttcataatgtagatttccgtatttgtcttccgatactctattttgcagagcgttttccagatccacaggaagttttgtatccaactcttcacttcatcaggtatataaaggaagttttgttgggaaggtgtcatgttcctagacttagacttctttctctggacagttgctaaaagtgaagatttgggtaacagagtaatacagatgcccttagggtaatcagcagcttcagagctcactttgctggattcatgaattggctctgtaattggcctctaaggattttcctcattttctcgccagctcagtcacacatgtaaaatgatcatttttagatatttcattcctggtgggttattcagattattgctggacctggaagtcaaccatggttttcttatacgtttcccagccctgcacagcatttctaattgctttcttttctcctgttgataagagcatggtgcgtcttttaccatacactccaattatctagcttatctttcatatctataaggaatctactgccttcacacccatttcttggagacctttttttttttgtctcaacttttattttaggttcaggggatacatgtgcaggtttattacgtgggtaaattacatgtcatatgggtttgttgtacagattattttgtcatcgataaaagaaaaactttagctgaattaaatttaatggagtttaattgaacaatgaatgattcacaaatcggggagcccccagaatcacagcagattcacagagactccagcgcagccacgtggtggaagatttatagaccaaaaaagggaaatgacgtacagaaatcggcagtgaggtacagaaacagctggattggttacaggttggcgtttgccttatttgaacacagtttgaacacttagcagtctatgagtgattgaaatatggcctttgggaccaggccaaggctcagttactgttacaggcacatactcctaagttaggttttcaatgttgtctgactattaaggtaggttacagttcatccatccacaaggactcaaatatagaagtacagagtccttctcaggtcatatttagtttgctttaacatcatccaggtaataagcacagtacctaacaggtagtttttccgttcttaccattctcccaccatacacctttacacccttaagtaggctccttgttcccttctttgtatctatgtgtagtcaatgtctagctcccccttgtgagaacatgccatatttggttttctgttcctgtgctaatcggttaaaataatggcctccagttgcatccattttgccgcaaaagacatgatttcaatattttttatggctgtgtggtatcccatggtgtatatgtgtataccacattttctttatccaatccaccatagacgggcactgtggttgattccatgtctttgctattgtcaataggactgcaatgaacatatgcatgcatgtgactttatgatagaacaatttatattcctttgggtatacacccagtaaggagattgctgggctgaaaggtaattccgttttaacttatttgtgaaatctccaaactgctttccacgggggctgaactaatttacattcccactagcagtgtataagcattctcttttctctgtaatttcttattttttgactttttaatagtagccattccgactggtgtgagatggtatctccttgtggttttgatttgcatttctctaattattagtggtgttgagcattttcttatatgctttttggctgtgtgtatgtcttcttttgagacttcatttcttggagaccttgaacattctaccccactatgaaccagtgacttttcaaccaccatcctgagatctcttttctcttgctagggtgaacctactatttcctgaatccaatggcttccaatattttgaatgtttctgcattttccttatcatttcattaaacaacttctcagttattggacacttttaagtccattcacatctaaaaatgcctttattttgctctcaaacttgatggatttttttgtatgaaatataggtttaaaataaatgacctgagcttccagttttacttccagcatctgaagagctcagaagtcatcactcttgtcctcacaacaagaaaaaagctgaacacattaataatcaataacttttcttggaccatattgagaattgaagtcccagggcaaaccaccttataaaatctggagagactagcaaattcagagtcacagccaagatatttctacctagagcaacagtcactaaagccttaaacttaaatctttatcactaaagatattcacatgaaagtgaatatctcctagggctgcacactcatgggttttacttccaggaaccccaccaggttcttgcagtgaagaacaaggaaagatctcctggttttatatgtatatatacatacatataatagcagggggaggaaaaaagaaatcttttggaaatgcccagagtattctctacaacaaaggactactctctaaggggcatgacttttccagggcctatgagagccaaggagaaggtcacttacccacctctggtcctctctatccttcccgtctcacgtaagcagaaagaaggaatgctaggaaacatttgtgaaagtcacaacccaggagcacagttccactgaaatatttaatcataagattttagagtgctttcactatcctacaccttactaccatatcaacagggccccagtataaaaactgtatattagagttgtaagaggagcaatgtgcagaccctatttaagaaggagttcctagggaatcccaaagacaatagggaagacaaaaacagggacactagaagaatttgaagcttctgtcacgtacatctacaggaaacgttaaacagcccagcacctggccagattaacataaaacctcacattaaagtgcttttacctcagttcatacaaccaatacataatgcccagctttcattaaaaaaattacaaggcaaaaaagtaacacagagcaaagacagaaggcaagcatcaggaccagattcttacaagacacatattttggaattatgagactgggaatttaaaataaatgggggaggggctcaaataaaaaaaatgatgagctgcaagaatgattaataaaataagcaaagagataaaaaccctaagaatcaaaataaaatgttagaaaccaaaacacagtaacaagcatggagaatatctttaatggttccatgagtagactgaatgtggctgaggaaagaatcagtgagcttgaggatatgtcaatatcagctttctaaactgaaatgcaaagagagaagaattttttaaataccgaaaaaatatctgagaaatatgggacaatttcaaaagtataaaatatacacaattgcaacactaaaagaaagagataacagagtagaaaaatatttgaaataatagtggctgaaaattttccaaaagtaatgacaaatacaaaaccacagatcccagaagttcagagaatgccaagataaataccacaaactatgcctactaggtacattatattcgaaccaaaaaaaactaaagacagaaaatcttgaaaaaagcagagctgcgatttggaaatttaccaacagaggataagttatacaagctagaagagaatggagtgaaatatgtaaaatgttgggaaaagaacaaaactcaccaacctagaattccatacaagagagttttttttttaaatttctaatttttaaaattagaaaataagtgctcctttttctccacaacctttccagcacctgttattttttgactttttaataatagccattttgactggtgtgagatggtatctcattgggtctttgatttgcatttctctaatgattagtgatgttgagctttctaaaatatgtttgcttgctgcatgtatgcatgtcttcttttgaaaagtgtctgtttatgtccctggcccacattttaatagggttgtttgttttcttcttgtaaatttgtttaaattccttttagatgctgtatattagacctttgtcagatgcatagtttgcaaaatttttttttccattctgtatgttgttttctttgttgatagtttcttttgctgtggagaagctctttcagttaattagattccatttgtcaattttggtttttgctgcaattgcttttgacttcttcatcataaaatctttgcccatgcctatgttctgaatggtattccctaggttgtcttgcagaattttatagttttgggttttacatgtaagtcttctatccatcttgagttaatgtttatatatggtgtaaggaaggggtccacttttaatcttctgcctattgctagccagttatcccagcaccatttattgaatagggaatcctttccctattgcttgtttttgtcagatttgttgaagatcagatagttataggcatgttgccttatttctggattctctcttctgttccattggtctatgtgtctgtttttgtgccagtaccatgcttttttggttactgtagccctgtagtatagtttaaactcaagtagtgtgatgcctccagcttcattctttttgcttaggattgtcttggctatttgggctcttttttggttccacatgaattttaaaatatttttttctagttctgtgaagaatctcaatggtactttaacaggaatagcattgaatctataaactgctttgggcagtatggccattttaatgatattgatttttttctatccatgagcatgggatgtttttccatttgtttgtgtcatctctgatttctctgagcagtgttttgtagttctccttgtagaaaactttcatctccctactttgctgtattccttggtattttattcttttgtggtaactgtgaatgtgattacattcttgatttggctctcggcttgagaacttgttggcgtatagaaatgctagtaattttttgcacactgattttgtatccaaagactttgctgaagttgtttgtcagcttaagaagctttggggctgagattatggggttttctagatataggatcatgtcatcttcaagcaggggtagtttgatgtcctcttgtcctatttggatgcctttttttttttttaatctttcagttgtcctgtctgagacaactaatattttggataagagtggtgagagagggcatccttgtcctgtgctggtttttaaggtgaatgtttccagcttttgcccattcagtatgatgttgactgtggatttgtcatatatggctcttattattttgagccatgttccttcaatacctagtttattgagagcttttaagatgaagaatgttgaattttattgaaagtcttttctgcatctattgagataatcatgtggtttttgtctttagttctgtttatgtgatgaatcacatgtattgatttgcatatgttgaaccaaccttgcatcccagggataaaggcttcttgatcatgttggataagctttttgatatgctgctggattcagtttgccagtattttgttgaggatttttgcatcaatgttcatccaagatattggcctgaagttttcttttctttttttttgtatctctgccaggagaaaaatgagtgcttatacattgttgttgggaaggtagattagttcaaccattgtggaagacagtgtggcagtttctcaaagacctaaagacaaaaataacatttggcccagcaatctgattactagttatatacccaaaggaatgtaaatcattctattaataaagacacatgcaggcaccactatttgaaatagcaaagacatggaatcaacctaaatgcccatcaatgatagactagataaagaaaatatggtacatatacaccatggaatactttgcagccataaaaaagaataagatcatgtcctttgcagggacattatccttagcaaactaatgcaggaacagaaaaccaaatactgcatgttctcacttataagtgagagctaaatgatgagaactcacggacacatagaagggaacaacacacactgaggcctattggagggtggagggtgggaggagggagaggatcagtaaaaagaacaataatgggtacaaagcttaatagctgggtgctgaaataatttgtataataaactctcatgacagaagtttacttatataacaaacctgcacatgtacccctgaatgtaaaatacaagttaaagaaaattaggaagaaataaatactttcttaggcaaataaaaactgagaatttatcattagtggaactgccctgcagaaaatgctggacaaagtcattcaggaaggagaaaaacgtagtaagttagcaacttggatctacataaagaaggaaacagcatcagagaatgcataaatgaaggtaaaacagcatcttttacctcttaagttccaaattgacctaaaataactttatctaaagcaatgatagtgacaatatattgggcaattatagcatatgaataaataaaataaatggcagtatctcgcctgggacaggaaagaagaattaagaaaagtctgttaaggtaaatgcactacatataaagtggtagaatattatttaaaggtgaaattgtgctagttgtaaatgtgttgcaaactgtatggcaagaaccaacattttcgttaaaagaaatttaattgatagactaaaggaagagctaaaatggaattatgcaaaatgtttaattaaaaccagggaagacagtaagaggagaaaaagaagaaaagaaacaacaaatacaataaataaaaaactgttacaagcatgatggatattcacccaagtatttcaataatcactttaaatgtgaatgatgtgaataagccaattgaaagacagaggtctgcagagtaaattttaaaaaaaagcttaactgtatgtttactccaagaaactgacattaaatataaagatagaccaaaagtaaaaagaaggagtgacatatactgtggtaacactaatcaaaagaaggctggaattgctatattaatttcagcaaatttcaggaaaaaattatcagggataaaggggataattacataataataaaagggtaaaatttcccaaaagacataacaatccttaacctaacagcagagcatcaaaatatgtgaagcaaagattgacagaactgtaaggaaaaaaatacattacaccactattattgttggagacatcagtacccctttttccatagtgatagatgaaggaggcagaaaatcaatgaggataaggttgaactgaacagctgtgtcaataaacttgacctaactggcatttatagagagctctatgcaacagcagaagaatacaaattctcaagcttacatggaatattcacaaaattctgtgccacaaaacacagcttaacaaatttaaagtagtagaaatcatacagagtattttttcagaccactatggacttaacatagaaatcagtaacagaaaaatagtggaaatatcttaaatatttgaacattaatttttatctcagttcattttctgctgctataacagaataccacagactggataatttataaataaaagaagtttatttggtgtgtggttctggaaccagggaagtccaagagcaatgtaccagcatccagtgtgaatcaacccactggagaaaggtggaaggcagaagggcaagagaactcacgtaagagagttcacttttgtaacaaaactagagcagaagtcaatgaatttaaaagcacataataataataataataataataataatagtaataataatgaaaatcaacaaaatcaaaagctagttatttggaaagaccaataaaaatgggaaaactcttgccaggatagctaaggagaaaaaagagaaaaaacacaaattactaatagcagacatgaaagaaagatcattgccactgatcacataaacatcaaaaagaataataaagaaacagtatgtaaaactgcatgcccacaaatttgataatttagataaaatggacaaactctttgaaagacataaattatcaaaactcaaacaaagagaggcagataatttcaacaggactatatctattttaaaattaagtcaataatcaataactttatgaaaagagagcaccaggctcaggtggttttcgtggtgaattctagcaaacactaaggaagaaataatatgaattttctacgatctcttccagcaaacagaaaatttaacacttcctaacttatcctatgaggccaacatattaccatcacactaaaaccagataaactcattataagaaagaaaaaccatagaccaatatttctcatgaacatgtggtagatagaattatacacccctatcaaccctcacccccaatggtatccacattctaatccctggaatctgttaccttacatgacaaaaggtactttgcagatattgttaaggcctttgaaatggaatgactatcctggattaactgggtaggactaatgtaatcatagggatctttaaaagaagaaatgatagggtcagagtcagagaggagatgtgatgacagaagcaggtgttggagtaacattctctgaagatggagggcggggccagtagccaagggatacagtaggcctctagaagctggaaaaggcttgtaagtagattatctcttgaaaattccagaaggaatgaagctctgccaacgtctcagtgttagcctgtaacactcacttcacacttctgacttccagaactgtaaggtaataaatttttgctgtcttatgccattaagtgtgtgataactttttatagtaggaaaagaaactaatacaacatagatgcaaaaatgtttaacaaaatattagcaaaccagatcagagaaaatgtagaataggaattgtacaccatgaccaactggactttattctagggctggctcaacatttaaaatgaattaatgtaattcacaacatcaccaggataaagaagaaaatcatctggtcatgtcaattgatacaaaaaagcatttaacaaaatccaatacccattcataataaaattctcagcaaacaaggaatagaggggacttcctctactctgtaaggaatacttacaaaaatccaacagctaacttcatacttcctggtgagaaacagatgcttccttactaagatcaggaacaaagtaaagatactccttcacagcactcctattcaacatattactggtagtcttagtgcaataagacaagaaaaggaaataaaaaaaaaagattagaaaggaataaataaaactgcctttgttcacagataatattattttctatgcatgaactctcttcaaattgacaaaaacaatcccccaaacccttctgaaattaataaacaaatgtagcaaagtcataggattaaaagttaatatatgaaagtcaattattattggaatttgaaataaaaataccatttacaataacaccaaaaactgacatacttaggtgtacattaaacaaaatagctacaggaactgtacgtggaaaaccacaacactatgtgaaaaaaaatcaaagatgatctgtttatggtttgtaaatctcaatattgttaagacatcaacttttcccagcttgatttccagttttaatggaatcccaatcaaaatctgagcaagttattttgtagacactgacaaactgattctgagcttacacagaaaggcaaaagacctagaattgtcagcacaatgctgaaaactgcagaacaaagttgaaggactcacattacctgattttaagagttgctataaaactataataattgagaaagcatcacattgatgaaagaataattatatagatcagtggaacacaatagacaacctagaaatagacccaacaaagtataatcaactgacctttgacaaaggaacaaagataattcaatggaggaagaataggctttccaacaaatgatgcaaaatatcagagaggcaagagaaagaaaatggatctaaacacagaccttagtactttcatgaaatttaactcaaaatggatcataagcctaaatgtaaaatgcaaacaataaatcttctagcagaaaacacaggagatatatatatatatatatatatacatatatatatatctccttggatttgatgagttttgatgagtttgatgagtttttagatacaataagataagtacaattcaagaaagaaaaaatggtaaattgtagtttattataattaaaaaattttattctgcaaaaaacaatgttaagagaataaaacataagccacagatgggagaaaatgtttacacaacacatatcagataaagtacttgtatccaatatacaaagaacccataaaactcaacaataagaaaacaaaaaatctaatgactaaacatgcaaaagatctgaacagatacctcaccaaagaagatggtgacatataagtttacaaaaaaatgatcaatattatttgtcattaggagaccccaaactaaaacaataatgagatactactcctcactaattaaaacagctatacttttaaaaaatgacaatacgaaattctggaaaacatgtataccaacattgctggggtagatagtgatacagccactttgaaagacagattggtagttttttttacagttatatagttttgccacacaactcagcaatgtacatagatatttatagcagctttattcatcatcaccacaaaatggaggcaaccaagatgtccttcaataggtaaatcactaaacgtttgtacattcatacaacagaatattatttggaattttcaacattaaaaagaaaagatctagccatgaaaacacattgaggaatcttaaacacatattgctaagtgaaaaaagacaatctgaaaaggctacatattgcataattccaactctatgacatactggaaaatacaaaactagtgaaaagaccagcggttgccacatgtttggagaaaggtgggaaggactgaacaggtaaaacctaggtaattttttagggtgattaaaccctttagtttggtaatacaatggtggatacagacatcatgcatttgacaaaaccatagaatgtcatagtagagtaaactttgatgtgtgcaaattagacaaaaccaatccaacctcagtgatgtttacgacaggaaaagttcaacctaagtaactttgaaaatgggtggattctgtaattctaaaggtaaaaggatctgcacaaaaggactatactttggttgataaagttgcttcccatgggtgtagagttaacaattctgattctgtatatgtatactggaattgaacaatcaagttcaatcaactggatggcagatagtgggaaacaggtttcttactgtgggaatggtagtttataggtaagcaaggagggggctagaataatccatatggtagttaattatagctgaattcatatttagcttaatatagacccagattgttacctatagaaatatttatagatgcgtgcataaatatgtaatagtatacacacatatatttccttgctgtgtcagcttagagagcctggaagcagtagtaccccagtagtaaggaacacaccttcctcagatcttattttcaaataccatcttcaataaaagaggcaaggctctttggataaatggcagattttaggatcaggtcaggaaatatacaagatgagcctggagtaacttgtcatgatagaaagtaatgaggtgctcaaaaaccaaaaaaatagaaacaaaaacacaacaaacacacattgatggggttatgtcaaaggtacacagaagccaaccgaaagagctcctatgaccaaagctggaataatttgggcgaagtaaaaatgtaatattggattataactcaaattataaaataaatattagtgagtccaaactgatataaagaaatgattgattaatgggggaaagaggcaaatctctcggcagacatagtctaaataacttacatggatgttctactttcgtggaggtggatcgtgaggccccattccttaaatgtggctgtgcgtagtacagtatgaaaagggggaaaaagagtaacgttaccacaggaaagcctgacaaaccttaccctagccaggtaataaaggtcaacatccatagtgatgtcttgttgatagtatttacccttggtaggaagtgaggagaatgacgttttacttctgcgatcttcttcccctaaccccataacctcagtctatacatgagaaaaaaattagacaccttataagagaaggacatcctacaaaatctgaccagtattcctcaaaactgtcaaggtcattaaacacaaggaagtttgagaaatggtcacagtcaaagggagtctaagaagacatggcaagtggcacactggatgggatcctggaacagaaaaaggacattgggtggaagctaaggacatctgaataagtatgactagtattggttcattcattgtaataagtgtaccattgtaacaaatgtaacaaaaagattgtaaaatattaataacagaggaggctgagtgccaggtttatggcaactctgtatatcttatatattgttctgtacactatcttatcaattgttctgtacatctacatatgttctaaaacatgaggtctatgtttaaaaaattaccctcagaaccatgaaggcagtgtcttttagtagccagtggtgttcatgagaaataagattgttgctccttttgggagataagaatttttccccctttctcttctggaagttttcagacattatttattttgttaaatccatgctgttcttaagtttcctgacaatgtttcagatgtgatcttctgtcattcatcttaatcttcacactatactctttttatgctgaataattttgtatttttttccggagtttcttttattacacatttgatcattttcttttccttttcttctctttctttttcctgccttcctccctttctctcttttttctttttctttctctcttttccttccttcctttctttgtttctttctctttctctttctttctttctttctttctctttttctttcttcttctttctctttctttctttctttctttctttctttctttctttctttctatctcttttctctctctctttctctctcctttttcttttttttttctttcctttcctttcatttttttttttctttcttgcccagactgggatgcagcagtttgatcttggttcactgcaacctccacctcccaggttcaagcaattctggtgcctcagcctctttactagctggaattacaggcatgcactaccatgcctggctaatttttgtatttttagtagagatggggtttgtcatgttggccgagctggtctcgaactcctgtcctcatatgatctgcctgtctcagcctcctaaagtgctgggattataggcatgagtcatcacacctggcctccattttctgatctcttgtgtgtgtgtgtgtgtgtgtgtgtgtgtgtgtgtgtgtgtgtttggcttcttttttttttattactatactttaagttctagggtacatgtgcacaatgtgcaggtttgctacatatgtatacatgtgccttgttggtgtgctacacccattaactcgtcatttacattaggtatatctcctgatgctatcactccccgctctccccaccccacaacaggccctggtgtgtgatgtttctgatctcttttctagttacttcttttactgagatgtttgactgcctggaactaactcttacttgccttcttcattctgtctacttctataattctgatctatgttttaggagaggtaccctaactctatcttgcaatcattctactgatattttatttttaatttctaataactcttttatatatttttatttttcactttttagcacactattttttcttaagttttttttcttttttttaactttcattgtacattcaggggtttgttatatgggtaaattcatgtcatgggggtttgttgtacagactatttcatcatccagttattaagcctagtaccaaaacagttattttttctgatcctctccctccacctgccctccacccttaagtaggaccaagtgcctgttgttcccctctttgtgtccatgtgttcctgtcattttgctcccatttataagtgagaacatgtggtatttggttttctgtttctgtattactttgctaatgatgatggcctccagttcctttcatgttcctgcaaaggagattatcttgtttttttttgtggttgcatagtattccacagtgtgtatataccacattttctttatccagtctaccactgatgggcatttaggttgattccatgtctttgttattgtgaatcagcattgtatttttaatagattcatttctactcaaattttattgaggctaagacatataactatcttatttgtcattgttttacctgatttttggggttattctgctcagttatgttgcctttcttttttccacgctgctgatttttatcatataccttataattcttggtttcctttttatatgtaagaattaagaggcatgctgatagttgtatggagttgatgtaaggcttctgtgcacatttataggtaggtctgtcttgctgctgggcttctgggaagagggaggctggtttcccttcaaggtggcctaaagtaagagaacttactgcctatgaagttaaggttattcaggtgcagaaccataagggctttactcagtaccaaaagcaactcgttatacaaactcttcctgagaaatttgtttaacttacttagaggagggatttttatattttttacttttggaggaaataatagacttcctaggctcagggtgaaggcaaggtagatggcactgccattcatggttaaaccttcaaataattaccttcttcctctttccctccttccaggcttcaatccacttttgtgcctgtcatctccaatctaggatcacttataaatgggagctggggcaggtcatggtggctcatgcctgtaatcccagcattttgggaggccaaggcaggtggatcacctgaggtcgcgagttctagatcagcctgaccaacatagagaaaccctgtctctactaaaaatacaaaattagccgggtgtggtggcacatgccagtaatcccagctccttgggaggctgaggcaggagaatcgcttgaacccgggaggtggaggttgcagtgagccgagatcgcgccattgcatccagcctgggcaacaagagcaaaactctgtctcaaaaaaaaaaaaaaaaagaaagaaagaaaaaagaaagaaaaaaaaaggggagcttaatgatgggatcacatgaacacaaagaggggaatgacaggcacgggggcctactcgagagtagagggcgggaggagggagatgatcagaaaaaataactattttggtactaggcttagtacctgggtgatgaaataatctgtacaacaaacatccatgacatgaatttacttatataataagcccctgaaagtaaaagttaaaaaaaagaaaacaaaagtaacaaaagaaaaaaatagggtcctaaaaagtgaaaaataaaaatcatgggtcctcatggatccacctggacgatggactcctccttacctggaggtttctcctgccaggatgcccacttcttgcctctatttcactgcttacccgctcccatctgcctctgacacccgaaacattctggaattgcttgtccgctggtgtcagccattccccttcctaagtggccatgggtttgtttccttgcataatgacactgacatttccctgaaagttggaagagaaggggagaggaggcgtgtgatggacccgccaccttgaatggaaagccttaaattacttctcaaataaaaaggcttcaaaaatcaatgacaaactggtgaaataccaaatttaacacacactgatttaaattgcctttgtcttcaacgtataaacagatgggaagcttttcgaggattgcattttatatttctatatctcctcatattttataggactgaaggggcccttggagatcattctgcctgtatccatgaggagaccagatctctgagcagtgagctcttaactgactgtggagaagcccttcagttctggagtaagatccgtcccacttgaattgtagcttttacgctgactgcgagattttgagcaagtactgatttctctaagagccattctctaatctataaaatgacgtattaatggaacatgcataatagaattgttatgaggatagaatgagattatgcatgtaaagtgttcagtaccatgctgcacctaacacatattgctgttatcattaattattattaccaagcaggtttagactactagtgtacccaatgaacttttttttatggtaaatgatcatctaatttgttatctgttcactttgtgacattataagtgattaaagttgtataagggaaatgagaaaagaaatttaattttgttaggaagaaagattaagagaaaaaaattactgctacaatgaggtaaatggaacaaaaaagaaagaaactgtgagcagagtccatgtgagcagtcctcacaatccatatgcatttgtttgtttcgcctaagcattttggtgcctttgtaaatgcgaattattaagaacaactttcaaatgtttgacaatagcagaacttggaattaagattgtaaggaactagatggatgcagatacacagcgttttagagcagttggatggaagaaagagaaatattaggaagcattttacctttcaacatgggactcgataatagtgtaattacacaaacagccttctgagcacagaaagcaaaacaaacaaaacttatgagtgggaaacaaaaagaagccttaggacaaccataaatgagataatgcaatggaaggagagaagaagctgttggagccaagatggagagcggggtcttgggactggacacatttaacctcaatgtccaaacccaaagatcaattctatagttatgattcaggggctgtgggagtggttgtggggaaaagataccagattccctcttctcagtgttgtattcattttacagggtctctctgttgagtgtctgtttttcccatttgtttgaccaacacaggcagggaatgagtaagctcctcctggcgtacattgtcccgtttactgggtcagtgtttacattcacaacacaccaccctatatgaggtgctcttttggttaaccccacacagctgctaattagcaggtcacttgcgggttagaggtgtgcttgtgttgtgcttcttggctggctgttgtgttattataacaactgtaaatgccatatgcagctgccatacgggctgtgctcagaaggctgtttgtataattacaggcattagccagagatggagcctgccagctgacattcaagaggcaataataacttaatttccctcacagcaaattggctctctaatagggaatttagttattctctggacttagggatggcttgagaattccagcgagcacattttagtccagttattatgatcaggggcagggtaagcccactcataaccaagtcagtttcctgccctaagatccactaagaggtgcaatcacttcatattataacataactctttatttccaaaggaaaataatatatgtatgtaaataaatatatatatataatatacttcaaagaatacataggcattccaaaggtaagatgtctaaatatacaggcgtgtgtttgtgtgtgtgtttgtatacagttgtctcttggtatccaggacctcccctgataccaaaatcagtggatgctcctcaagtctcttatgtacaatgttgtagcatttgcatgtaacctttgcatgtgctctctaacactttaaatcacttctagattacttataatacctaatacaatgtaaatgctatgtaaatagttgctgtactatattgtttagggaataatgacaagaaaaggaagactgtacttttttttgctacagaaataattttttttggaatattttcaatccaaattcattgatcaaatttctggatgtagaacacatggatatgaagggccaactgtgtgtgtgtgtgtgtgtgtgtgtgtgtgtgtgtgtgtgtgtagtattcagggaaataaaacttcaattggcttcagtgagggatttgtcacaataagtacaactttaaaggtgccatgaaaggttgttgcccacctaatgtcttagtagtgagcacagttcagaaaattctgtctgtgtttggaattgaatcaatttgaaattcatctgggaagatactgcgactgtagctgcactgtgtctttgctcatgttttctctcagataaaatatttttccttccattctccatccaacaagcactagtgaaaattccatttcctctgtgatagctttctttctcctcctctttctacctccagagagataaaaagatcatatgatctttctttttggtattttttagtacaatcattaaaacattttatgtctcttataattatttgtgcccaggtctgtccctaagtgttgaccgggagacttttctaacagcatctgtttcttacccatctttgtaacacctatgatgtttttcccccagcaggtgctaaaagaaattgttaaaatgatttaaatatgtacatgtatgtatatatataaaatatataatgataatcattctgcattttaaaatttgcatagaatttcaattacatggcaaggacagaaattgttttaaaaagtatatggatttgatttatttaaaaataaaacctactttttgtgcaatatgtataaatatattttattaaatacatatatgttgtataatattaatatttcatatgtttgtatctatatattatacatatttattcctatacacattcctaatcatatttattcatatccatatctatgatttggctattctgtgcaatttaaataagattataaaacttttaatgatctagaaagatgtgatatcctctgaaatgacaaaagaaagttacaaaacattacacacactatgaatatagctttgtattaaaataatctagtaataaatgtttgtgcaccaaaagtctagaaagataagcataaatgataatattgtgtgtttctatgtggtgggatttaaattgctttttattttgctaactgtattttgtaaaatgtctacaatgtgtatataatgcttttgcattcagaaagaaattattattgatatataatttgattaatagagtcccaaaattccatatgaagaaaaattttagcatatctaaattctctttaaaattatttccaggccataagtgttagttttctatgcttaatgaacaggcttaatttattttctatatattaatacctcagggttgaggcaggtggtgtgtttcagagctcacaggtgcaacagggggtaggggtagaaagtcaatatattttgaagagaaaatgctggcactggagttagagcaatattaaatgaagcacgggctttgtgtgtttagctatgtgtttatttcttgtttattttgtaagagggtcaaacttagattaaacactgtcaaaggaacaatcagctaaagcttgatgggcttataccacatttcagacaatgctgttcatactgatatagggtctcttttaatctttatagctaccctttaaagtaggcttttacaaaataattgtatccattttacagaagagaaaattcaggccaaaattagacaattttcccatgtcatagttgtggagctagaactcaaaaccagtctatttgactctatagcccaggctatgtttgccttccaaatggcaaatatttgtgagtaaagggcttcagtgtattttggtgttgtagttctttatgttttgctctcaagcttgattttatatattatgtcacgagcaaaggctgtactgagtgcagtggatgggtttagtgtccttacccacatcctcttctcagggccagtggtactcaggggaatccccttgtcaggagattgcatcctccctcctcaccccagtggcagagaaggaaggcaaccagaggcaaatgattgacatgggagcatgaggtgggcacttactaagttcttacattgttctaatggtgttttgagccaattctctagtatgtttcaagagtacaatcatatcatatactatgagtggtaagtttacctcctctttcccaatggtttcacctctaatttcttacagttggttaataatattggccggtgcctccagaaagaggaaaaaaacaaatgtccatgatcactattaatgaacattcttcaattgtccctaatttccatagaaatccttcaagtattttttaatgaagtaggaggctggcttctagattgagatagatgtattttttgcatctatgcatctttttgttttattaatttattaaaacaacggaattactaaattgcaaaggtaggggaatcaactcatcttaaaagttggttaaaaaaagggagagaatcaaccattcattgtgtgtttccctatttgatctgtgccgtgggttgttaattatcaggtgagagaaaacatctcttttcaaagtatttcagctgattcatgaaaaaaagaaatgacagaattagattattggtgttttgcaatctccaatgaattaatggatctaagcattgggcatcaatgactgaacattgtaaggagagaaagaactagatattacatgtcttctgatgggagaccacaatcccacctttatcttgctgaagtatcaaacccaagtctgatcaaaccattagatctagatgctaatgtcaggaaatacggaggacagagggctatgttaaattgtaccatgagtgtgcaatctgtaaaattcagactgtgggaatatccatgtggcttatgtttctcaaacagataaattttaagaaaaataaaagaataaaaggggaacttgtcaattaaaagaaacttaacaggcgtaccacgtttttttaagtttgcaagtatggtaaaatgtatagatatacacttgataataaagcaatacagaagtgcaaggaggaattactctaaaggttaggacggtaatacttttatggggagggataggcttataattgagatagaacacatgaatttgtgaatttgttgaggacttggtctggtgaatattcaaagcagccagctttacaaagctaagattaccaggaagatagttatttaggaagcaaagcaaatgcatctttggcacagcaggttgctggcaaaccagctttctgataaaggaagacctgatttgtagcatcttgctcatttttatgatgtaaacactccaaccatggcctttttcaagctaccaaggagatgtcactaaacgtggagatgggagatgtgtttatgtattcatccatctgacatttcactggcttgtgaaagccagttccaggagactgctgagaaaatggtcaccgaagataaagcccatgatcttccacctttgcacttgtggggtttattgaaatatgtttttatgaacataaactttgctctgttttgatcaacactcaacgtaagataaatgacctttgtaagaatcaagccgggggatcagcggacccttgatcctttgcttcctttgtcctttgcattaagagatgcccacccttctactggaagagggccaagagtatttctgaaccctggtcttatgttgtaatgaaaaaattcttagaagaaagtgtagaggatgaagctgagctggtaaataatttaggatgcctgagttactgaagggcatggggagagatggctaggaagtgagatgctggtgacttgaaggattaaataatatctgcctttgggtgatatgagggtggaaaatagaaggaatgcagcaaaactccaaaagtctctatgtgctaccctgtggattaagccaatgtatacctttcagggaaatcaaattttctggcttaatgacttttgaaaactgatttagaagacatgaaatattaatacagcctccccgggcgtctccaggctttcagggcactgagacagctcatgaagcaaagtttctccagaattgctgtattgctgtttccaaggtcaccagaagctgggaatctggctctgcctctgaatcacttaaaatccagcttcctggtccctactccagaactaccagatcaaaggattatcggagcagggcctgaaaatacctattttccaaaaaaactctcccatgggttcttagataaccagtccagaaattggcattttggaaaagcaaagaaagtggtaaaacccttagaaacattaaatttaacagagtttaattgagtaaaaaaccattcacaaatcgggcagtccctgaagcagaatagattcagagaggcttcaatcctgctgtgtggttgatttatagacagaaacagccaggctggttacagctcagcgtttgccttatttgtacagggtttgaacagctggctgcctgtgattggccaaagctcagtgattggcccaagagtaggttacagttggtttacattcccagttaggttagtgttcagtatgtacagataaacttttaggctgggcataaaatgtagaaagaggcagctttggactaccttagtagaagtactaacagctcatagaaacatattttggggcagaaaacatggcaggaaggaggaaggactggagtgaaaaagagaggacaaaaggagcaactatttgccataaagctcaaaatgtggtccagggactcagcctgtggttcagcgtctctggcgccctttcccacgcggatgacatctctttgtctctggtctgcaccattctaacttcacgttgagtttttctaaccacatatatccagatctaagataaatatttctagcaagactctgctaccactcctgggccctgacactttcacaggggataagcgatttaaagcagccattaatcttgaattatggaccgtcagacgtagcgtgcacaggggcagcgggggtcgcggacttgactcagggactctctctgagatggtaaaatcacacctcataaatgctcttctgtgaacaaaatgtgcctttcctaacactaaggaaaatcaggtaaggagtgacaacaacacagtgaagaaactttttctctcagttcccattagaccgaagtttcaccttgttcatttcactgaaggaaatgcagtgtgttaagtctccagccctgttccttgccgaccttaaaccctcggtacaggagaattgccttcccattctctgtgaatccagtggacactcagaaaacatgaacagtctgcagctgcttcaagaacaagatccgggaatataaatatgcaatatacttcagtacttgaattttgcttccgagtcaaagggggactgtggagttgagtctctaacttcaataactgcggaggatctcactgaagtactcgaatgagtgcagggctttccacactgtcctctattttaatatcatagaactgtggagagttgtggttaagagcacaggttttggaatcagaaggtgctgaatttgaatcttgacttgaccctttatgatcttagttaccttttttagcctttattattattattatttatttatttattttttgagacggagtctcgctctgtcgcccaggctggagtgcagtgacacgatctcggctcactgcaagctccgcctcccgggttcacgccattctcctgcctcagcctcccgagtagctgggactacgggcgcccgccaccatgcccggtgtagccttattaagactttctttcttgtaagattggtgtgtgtaagtatgtgcacacctgtatatacactggtaattatatataacaatatattcacacatatgtatacatttgcttcatggagctgtcataagcaatacataatgtaatttaagcagagttctttgtacttttccccagtaacagtaattgctgtttacatgttattgccttctaaatgtgctcctagtactccaccatatataaactagaaggaagaaaaatctatccttaccatcttattttgaaaaccaggtgattagaggctgttagtcacaaattgatggtatcattctttgcagtatcatatgctattacacgattctttcttcaaaattatgttcttgcgttatttacatatttagtcaattactgtgtctctgtgagtgtgtgtgtgtgtgtgtgtatgtgtgtgtgtgtgtgtgttacatgaataactgaggggtctgattttctgtgtcccgtatctgtaaggggaaaacattgcagacagcctgtcattttaacaaatctccctggcgatatttttacacattaaagttccagagtctttctgaattctcttcttttatgtattcattcatctgacaactataaactgagtgccaactttgtcccaaaagtcgaaagggttaaatattgccgagagtgtccaagttcatttaggctattctctaaccctcagaaaccttgactttattgctcaggagataaaaccacttccttcaccctgtggccacagtagcattctctttggcaggcacatatgaaaccatgacagcgggaagggactcatgtctgcttgaaacaatgactatttcagtgtggatagacattaaggtgtgctggaccaggcctcagggaggaacacagtcttgagaaatgagcctggaaaaggtgggtagagggcagattgtaaataaccattctgatttagacagtgccaccgtgtgtctggcactttcctttacaaatgttattttatttaatcagcataacatataggtattattataacctgacattagcacatcaagagtctacttttaactccagccagggcaaagaaacttggaaaacagaagcattcccatcaggcagccatgctgggcagcagaaaactgtgcaaagcgaaatgcagatccaaagtctgaagtgtcaattgtatttctaacaattgcatatggacttcattagccggctaaatggtacctattttagcatcccgccagctggagggatttccagtaggaaacgtgagaagggaataagtctaggaatctcaggttccccagggccttctggaattcatacagatgaagcaagataaggtcagctctaacctcccttcccttcttcctgcaccctcttcatagttagctcatgaatgagtaagagcagagcacctgtatctgtctctaggaagccggggctgcttttctcgcatccctttgggcctctgaggctgagttcccctccgggatggtaggcagaaggagaaagaattcgttcagcaccagctctctgtgggaaacttgtatctctttgacatgaggattctttattatatgcttcctattacatctttagcagagctttgtgttggcttttcccataggttaaatataatgatgggtaacctaatcctgaaggtaacagaataatcttagaggacacaaggctctatttaattcttgccaaatgacagaatatacccaaactttgaacaggtccctacagaactccaataagtttttgtgtcttgccgagcttggagccagcgtcttccctttctattctttttcccactcccaggcaggatctgatttcacaccaattggtctgtaagaggataatggtatcacagttcaagacaggcaaccatgtagaattgttttatatgcttctgatactcaagaagtttcagtggcctgggcttggtctcagttttcaaggagagtcaattccagggcagaagacactgtggcaaagtagaaaaaacacaggttttggtatcaggttgacatgggttggaaacacaactcagtctcttgttagctatgatcttcgtcagtttctgggccacagttttttaattagtaaaatgatgataaagacatacctagctagtagaaattatgcaggaaaaaaattaaggaaatgtatagaacgccatttagcggcggaggtggaacatcttttcacacgtgggttcatctttaagatcatttgaaaatagagtgttgtccaatcaattcttcccatacttgggattgcagctctgttctgcacagtcaacaatcattgtgtttgacattggaagagtaggaggtaataattttgatatgtttggagacagattttctacctgaacactttctctctttctctctctctatgaatatatatatatacacacacacacacacacacacacacatatctgtgtgtgtatatatatgtacacacatacatatatacatatatgcacacacacatatacacatacatatatattttactgagggccttttatatatagtgaaatagacattgttttaggtgctgagggtttatgcaaataagaaaagcacagtccctgtcctcaaggaacttacagactgataggggagctgagtgctacagaggtggtgatagacggcaggtgcttgggctgcagtggttgacagaggaggctgaagtcaattctgtcagcaatgggaaagagtcaggagaggcatcaaagagaaagtaactcttgagctaagacttgagggtgatttgctgttttaaagaaagacaatcaatgacagcaagttctaaacagagagagctgcttgggcaaatcaatgaaactgcctaggcagatcaggaaatagttaaaagttcacagtggcaggagcatagagcaggagagagtccacaggtgaggttgagagttgtcctgggaccaggttctgaagggtttacagaacaacttaaaaattagactggtcccaagttatggaataaacagaattttctctgtaaggaagtgggataattatatttccaatttaggaaattactttggctgtaataatgaagagcacctcttagaagttaagttgtctgattcacattttctgcttggggtttgtagtatttcttgtgtctttggcttgaagtttttcatccagtttgggacattcttagccattatctttgtgaatattacatctgcttcattctccctctgttttttttctgtaaattttatcatgtgccatacgtctcttagaatcttttccaaatttttcttccgtctttctttctgtgattatgtaatcattgatgttatctgtttttgtaaataaagctttattggaacccagctatgcccactcatttgtttattgtgaatggcagctttttgagtccaatcagaggtgaatagtttcaacagtgactgtctggctacaaagcctaaaacatttactatctggaccagaaaaagtttcctgatctctgggctgatctattgttaagcaatctactgtgttctttgtttcaattatccttttgttaagctatgcaatttctagttgattctttttgtttctagttctttgcttaaattctccttctttgaatttttaaacatattaatcaattacaactatttttaaatgtatgtctgaataacaccaatctcttttgggcatctcttcttggtttgtactgacatttttttcttctcttgtgttttggcctttttgtgcctggtcctctggtgtaatgcttattaaattgtgactggtttatgatatattccagggtaattttgaagcttttgtctagatgagatttttttttagtttagataggatccactacagtttctttctttctttttttttttttttttttttgagagggagtctcgctctgtcaggctagagtgcagtggcgtgatctcagctcactgcaacctccacctcccaggttcaagcgattttcctgcctcagcctcctgagtagctgggattacaggtgccaaccaccatgacaggctaatttttgtatttttagtagagatggggtttcgccatgttggccaggctggtctcgaactcctgagctcaagtgatctgcctgccccagcctcccaacgaaatataaaggactattttgcatacaaataaagaccctgaatcatacatttggttgaacaaggtgcttacaagatcagaatgtaaaatacttgcagataggagacccagtaggattggcttttttagaagcaatttcagagccattcctactacaaaaacagtggtcctccacattgtagagtagtgaacattgcacctaagatttgtaaggaagtggcataaggtcatcatggaaaatagcggggagtgatcaagacctgggagtgactgctaccatatttgagcccaagaagacagttctccttaaaacctgtcacataggaacagagcagaaagctgcagtgatggtcatggctcagggagatatctctagaaagtcaaattctttaatgcagtataaagaaaaccatacactcccagaatgaaatactatcttctgcttaaattcttctgtcacctgacctagtagtgacctcactgtgtgttctgtgatgtcaattacgctgcagcctgagactcagtcaaacggagccccatctcacatatgctcaacctgagtgtccctacttgtccaaaccccttatcgatttgattctccatgagtatggctgaaaatcatagattgagagctggaaagcatcaccatcaccattttcctctcctctttctcctctttccccaaagagccctgaacacacatactctttgaacacaaagagtgaacttccagggaaagaaaggacagaataaatatgtatcctatttgatatttaggggaggaagaagaggtgcaactgtttatcctggccattagcatgggaaagtctatatctttatatatttcttaatgtagagtttattcttcccaacttatttgggttctccttcttaagaatttctgggccaggtgcggtggctcatgcctgtaatcccggcactgtgggaggccaaggtggggggattgcctcagctcaggagttcaagaccagcctgggcaacacggtaaaaccccgtctctactaaaatacaaaaaattagccaggtgtggcggcatgcacctgtacttccagctacttgggaggctgaggcaggagaattgcttaaacccaggaggcggaggttgcagtgaaccaagatcacgcggcttcactctagcctgggcgacggagcgagactccctcttaaaaaaaaaaaaaaaagagagagagagaaaaagaatttctaagtgtgtgtgtgtgtgtgtgtgtgtgtgtgtgtgtgttctgtacagggaaggttaaggtcggggtagcaggagcacagagagccatcacctactcactacaatctggggctgcctaaacatccagcttgagcagatggaactttccaaataaccatgttagcaaataattgttcacgtagtgactataaagttacaccaagttttcctgtgtttaagaaaaagatacagctcttaagaaacataaactcaggagccaaataatgattgagctggaggtgtagaaatggatttccactggggatgataaaattataaaatatcatgaggactctctccaccaaaatgtgaagcaagggagcagtaaagaaatagcaacttaaatttattttcttcagagactgaatcaaagtttccgttaactttgtttgttaagacagaagtaatgggtgcttcataacttgtttggcagctcctaacaaatattaatttttagatttcagattcaacaaacatttattgatgctcagactttctcaggcatggagcacataatttcgtttaaacctcaccatatttctttgaaataaatagtcttactagtgagacagctgaataccactgagtttaagtaatttgttaaaggtcacatagctactaagccatggagccaaagttcaaaccaggtatgggtccaagtaagttaatgaatcttttgatagaaagggaaaataatgagttatttctggaaagtaatctaagaaaattgtttcaaatactattattacttgaggtgagacacccagagaaatggaaaaatcactatgagcaaaaggtgggctggccattcttttctgaagtttatcttctgccattaaaaaaaaaaaaaaaaaaaaaaaaagctccatgatccccagtcaaagaataattttgcaaaagctcagtgggcttacttgtatcctatctggacttaagcttaactttgactttctaacacataaaaagttaaggaggttctaattatctgtgctcaaaaaaattaaaaagcaacaaataaggataattgttttctcctattgtaagatcattggaaatgccctttccctatgggtgcccaatttttcagctagtaaagaaagacttacatttggtggttctgacatcaacagtttaacagtggaacactaaagatttgaggctatcaggcaatgaaggcagtaccagtattggcaatgtaactacaacaattgttgggggccaaatcctcagaacacctgagttctgggtttcagatcaagtcaaaaatctcattttcgggggtaggggtagaatatgtaactttgaggtcttttgccatgatttttatttttttcataatatatcacaactgtttttaaacacaggtgttaaaatttgttttacatggcttttcaagagaataaatatttcttttaaaacaccaaatacaaagtccttaaaaataagtaaacaatattattttaaaaatacaaagatgtttattattaatttacaatatttttaactatgcagaatttttatgtaaaaatatttttaaattatttgaacatcagaaaaatacatatataataatctaccttttgattttcctcctatatcatagatgcttatctggtccaaaatatggtttctttcaactaattgtctcaatacactttaacaccactgtgtgtaaaaagttccatttaagagtacaaattatgttgtgtctcacgtaggaaatgaagctagaaattgtataaagcaatctttacagcaaaagcataaattaattcaatttttatttcccatgtaaagcttcatgtattttaaaatagagttttaagacattttatgtactaaatgttcttacaatgaaagatgtaatatattcttattatttaaaggatgtccaggttaaaaaaaaaacaaaaaaaactggcagttgattttctttttgctcctccatctccaggtaatcagtgtataaaacttagtatgtgtttttctacaactttatccttgttcaaacaattatacacaaacaattatataatacttactaactttttttttttttttttgagacggagtctcgctctgtcaccagcctggagtgcaaaggtgcaatcttggctcactgcaacctccgcctcccgggttcaagcgattcccctgcctcagcctccctagtagctgggattacaggctcctgccaccatgactggctaatttttgtattttcagtagagacagggtttcgccatgttggccaggatgatctcgatctcttgacctagtgatctgcccaccttggcctcccaaagtgctgggattacaagcgtgagccactgctacagcacagagctactgttttatgtctttttattataattgttttatactggaacagtttaaaactaactgaagctgtaaaaatgatacagagagattccatgagccctttgttcaactttacatgaccacagtacattctcaaagtgagggtattgccattggtataatactgttaactaccaagctgcagacttcatttgagttttaccagtttgtacatgcacttttttactgtatatttctctgaaattttattatatgtgtagattcatgtaactatcactgcaacccggatacagaactctttcgtcaacaccaaaaaacttcctcatcttacccattagtagtcacactctccccacaactgtaacccctggcaaccactgatttgttttccatcattacaactgtattactttgagaatattacataagcagaatcgtggagaatttaaccttttgcgattcccttttttggttctgtataatgccctcgaggttcactcaagtggttgtgtgcaataatttgcacactaattgctgagtaatatcccattgcatggttgtaccagtttttatagccactcatccatagaaggtcatttcagttgttcctagtttttggttattacaagcaaagctgttatgaacatctgtgtacaggtttcagtaagaacacacattttcatttctctaagataaacacccagtagtgggattgctagattatatgataggtatatatctacctttataaaaaactaccatagacttttctagagtgcctgtatcattttgcattcacataagcaatatatgattcacatcttttaaatctgtatcctttatataaaattaggtgcttgttatgtaatttcaaatcacattttaaaaattccttgagtattctttgaaatcattattttattatctgcgaactattttatcatgtggatataccacaatatattcgatcaaaccacttattactagatattcaattttcaaatttttgttaggagaattatcattatgatcaatatctgtattagtcagagattggccgggaaatgagaaatcacgctaggtattttagaaggaatttaatctagggaatttacgatagaggaggagctgaaaaaccagtcactgagcaacccagcatctagagagagcaggaggttgctatcaaccctggaggaggagtgataatatggggaaggcaaactactgagtgggaactggaaatatgacaagaactgcttggaaagtactggaaacacaagagatttctgtctactagcagctgaggcatagaaaagacagaactgcttccgtttaggtcacaaaagcagagacagagttgagaagtatcttgggttctcccttcctctgatctgcttttctgccagtgccttctacagcaaaaactatccagaaacctgaggacaagagagcctgggaacagtttcccagccttgggaaaagcctgagcagtttcctcagaatggcaaaggtgggtgtgaattgatagcaaacaagtctgacgttgaagagcatgtcatccttgcacacaagtgtttttgattatttgcttaggatgcatgcttagagatggagctgtagaacgagcagatcaaaagaaaaaccattttgagggctttgatatgtatttggtatgtatcactaaggtgtcctctggagaaactgcaccatttgcccatgcctcagagtccctggcactgaaactgccattggaaacaataccccagtgtgacagaaaaataaattattggccgtgtgcggtggctcatgcctgtaatcctagcactttgggaggctgaggcaggtggatcaccagagttcaagatcagcctggccaacatggtgaaaccccgtctgtactaaaatacaaaaattacccaggcatgatggcgggtgcctgtaatcccagctactcaggaggcagagacagaagaatcgcttgaacctgggagacggtggttgcggtgagctgagatcataccactgcactccaacctgggtgacagagccagactctgtctcaaaaaaagaaaaaaaaaagaaaaaaaaaggaatattcaaatgtttttaatgtcttttaccaagactttatccttttcatgagaattgatggctgacattctttcttatttccttttagatgtttactcattttaaaagcaggtttattgaggtataattgacatatgacaaactgcacatatttaaagtgaaaaatttgataaattttgctgtatatatacaccgatagaaccatcaacatcaagaaaatgaatatatccatcagcttctaaacttttctcttgcccctttataattctcccttccacctctgtgcacctgcccatactatcatcaggcaaccactgatccactgtgtgtcactctagatagctttgcattttctgggaacttatatcaaattgaatcatataggctattccctctacctctgtctcactctcattttttgttctggcttatttcactcatcatgattattttgagatttatccgtgtctttttttgttcatttagttttattcctgagtagtattctattatatagatggaccacgtcatccatctaccttttgatggacacttgggctggttccagtttttggctagcacaaataaaactgctatgaacgtttgtgtgcaagcacatgcatggacaaatgctttttatttctcttggataaataattagagtggaatgaaaagtatatgtttaacttttaagaaactgccaactggctgtttcaaagcagttgtggcatttcatattccctgtggcgtctgagaattccagtctctcctcatctctgccaatgcttggcatagtcagtcttttatatatttaaacatttttcctcatgtatgttgcaaatgtcttattgttttgaaagagctgctttttttagctcccgtttgattattccattctcagtgtgggctatgtattttatcaggttttctaggttggttcctggcctgagtttaccttggtcccacccaacaaattcctcatttccctcagggatttcacaaaactctgggttcttctacaaaagagatcattcccattatcttcatggctcctcaaaataatcatgaatttttgtaaggtagaaagcaagctagtgtaatatcacaacgtggtactctcagtttcttctaagtgtttttatattgcccccagtttttggtcagagacaaggtctacaacttcaaacatggccctcataggcagttgcacagtcaaacttcatttctcatgacagcgatacccaaatgcaggatgtaaagcatctgataaacaacaccaaattctggatgtattccccatgtcacaatggcacatttgcaaactgagttgcagagttagccgtagggaacttctcattggtctccaatgtaaatgtaaaaatgtagctctctgaacaaccataactgttgatttgtggtatgtgtttggaaagcaaagcatttaggcactgacccaaatgtaaagtggaaataaggcctacaaggcagatgtttactatcctcaaacaaatggaccatagggctccatggatactccagctgttgatttgatccagtttcagagaaagagagttccttcatacaaaatcacatttgcttttgcaaaaacatggttatgagtgaaaaagacattgccttttagaaatataatctgatgatgatttgtttggaaatacattgagtccaagctccttccccactctcacagggaacagaatagcattttctaagtaagtgaattaggttattggaatgtatgttacatatattaaaaattcatttagcaaaaaattattgataatgtatgtcatacactttgaaacataatcttttgactcatgtagcttagattatagaagtagaagatggatgttatctgaagaagatacaaacagatatataattaaaatggagatgaatgtttccatgggaaagtacagagtgttatgtaaaggtatatatctgggacttgccctcgtctggggttttctctgagaaatgatatttgatttgaaacttgaatgataattaactgaatgaagagatgagaaagtgaattctagtcagaggaaacagcatacccaaaggccctgtatcaggagggaacagggccctcttagtccctgaagaaggccagtgtagatggcatgaaaaggagggtgatagaaaaggcaggcagggggctgacactgagggctttattgaccatgttaagttgctttggttttgtcccaaaagaattagaaaagtcactaaagggtttgaagtgatggtgattcatctgatttctgttgctgaaagattgttctggctgcgttgtggagagctgtttagagtggcatctgattgaaagcaaagagacctgaaagcaggctggggcaggaaaaccccgggtgccagaagagcaggtttggaagttcaattcagtttcagtcatgatgagtttcaggtgactttgaggcactctgagggaagacaaatgggcagagatatgtgtggctctggagctcagaagaaagacctgagttcgaatgatgcatgtggctgtcactgtcacacagatggtggcagaagctgttggtaggtatgccttggacttcatagactttacagaattgagagtaggcttaaaaccaaatcatgacggatctcagtatttaatgtctggatatttagggcttgcgaggtcaggagaatgagaagtgttctggagggtggggaagtatcaagggaatgtggcatcatgaaaatcaagggagaaaagtgtcttcagaagagggtggttaagagcatcaccaattgctgagaggttaagaactatgaggcctaaaaaataatgtactaagtttaaagtattttatccattcttattaaaacaggtaggtttgttttacccctataagtttgttttgtgctatatccttgttatttcctttaagttacgttttggtctatatggatttttgttgttgttgttgctgtgacatttttctgtgttttggaaagaatatatattgcatatagtggtatatatatttttaaatctaggtttaatttccacttttcctaattgctagagtcattcaataagtattcttaagtccccttataaaaaatgagaaattaagcaatttatatggtttcttcctgctttctgtatctattgtgcaaaaaaatgatatcatctgggattatttagtacatttcacattttctgttctaagaatttttttacatttactttttttgcatttgcaacaaataagcattctgtgtatgtttatttttctttcattttctcttttctctctttctttttcttttcttttctttatctctctctttctttctttcttcctccctccttccttccttctttccttccttccttccttccttccttccttccttccttccttccttccttctttgcttccttgctttctttcttggtttctttttttatagggtccttttctgtcacccaggctggagtgcagtggtgcaatcattgcttactgcaaccttatactcccgggctcaagccataccataccatatctgccttacatcttttaggccatatctgcctcattcttgtcgtctgcatttttttcatttcttgattagattgcatctttaattatatttaaataaaaatattttaaatgtttggattataacatagttctcaaaacaaaatccaaataatgtagaagtatagacaatgaaaaatgaaaggtctttacacttccacccccaggacagaaccacaattaaagacacaatttcttagtttcttttttctttgaaaacacatgggatggggatgtctagattttagcctacttggcaatttgcggccctatttaatgtgaaatttgtatctctctaaacttgtaactgttcatccctggaaaattctactttgatgatttcttttccatcttttcactctttctgcaaccctttcagctggttatgaaatcatcttcagttctcaacctacatcaggtaacacagttctacaccaccttccctcagttccacctagttgttgcaagttgctatcctggaatggattcaggcgtcgggactgaatagatacagtgatccgtaatatggctgcctaaaaagtgacacccctgtgagaaagggatggccacctggtgttctgactggtgtagccctagatttctgagttgtttgcagaaaattggaaatgaagaatcttcttcatttgtcggaggtttgcaggaggtctctgtttcaggtgaaaaagtcaagatatatgtttctcaattgagttctatgagtctcatagtcaggagtgactccttcaggtttcaggcatttatattgcctatctttttcagtatagttgcacatttttatatttctgaattttggattatttcaatggactgccttaggcttagtattttaaatgggaaatctccaaacatgtttattgagtacagattatagaagtgacacatgattaacctcctttatttaaaatgtatatgtgaagaatgataagagaaaggtacaaatctcccgattttatatcaaaataatatttttgccattctggtaactttttcccttgtcttagagtttactacagacaaaaaaaaaaatccccttaaaatatctattgctttgccgtttttaagtagcagtgaactggcctacaaatttattctaactgcatccacagctttttgctctcacaactgtcctgctggaatcgataaactgttgattaaaaaccttgttacttaatacatttagtaagcttaaactgttttttagaaacctaatcactttcatgtcactagctgcagggatagagacaaaagctgtggctaattattaacaacttcacaaagctgatattgaatttctaatgtatcccaaatgcccgttttctctgatttgttcctgtgtcccgctagctagcacattgctagcttggagaattgcttcatgtctaagatcctaaggtttcagaaaaacttgaaacagtagcagattctctggtcattttgaaacagtcttgtactgttgcaacatctggataccaaggggaataatcgctggctggtagaccgccaacagcatcctcatacaccacctgcttcaagatggctgactcccagcggctgagtaaagaggaggaagaggatcagaattgccttgtagaacagccaccctggttcagacatattctaactctgagatatctgtctcctcccttgaattctctcctgagccccagaactgtatttccaatggccaaatacacaaatattccccaagttgcaggggaccacagctatctgcctgaaacactatattgagaattggagactagagactgagaatttgaagtgaaaacccgttgtcaatctgtccctggggttatgtcccgggagtgaaggtgaaataattaaggcatccaattaagttggcgtttattggtgaatgctctgacttctgagtagctcacctgcgtatgtcatataatcttagaaagagcatgctggaatcattatgcttcagtcatgagtctcactggtagaacaaggtctaagggcaagacagaaagatcattttcccctgaaatctgcctatctcattagccttttcatgggtgataaaacttctccttctctccaaatatgcaggggtcccatggctatcaatactaagcatgccatttccattattgttataaattatgtgccaagtccctggagacccttgtcccaaggtacagatacttactgaagatgaactattatatgacagcacaagcgaaaaggaacttcaggaagtaaaactaacagacattttaataaaccattaatccatttaacatgtgtaaaatggcaattccagaaagtggagtacctagttcacaatgattattcctgaaattacaccacacacacaaacgcacacgcccccacacacacacacatacccctcccaagtaaatatgaccaagagtttaatattctaatttttcttaatggcttttgtttgatttttctaccttttctaatttttccaattgaataatgtattagattctgcccatccccccagattagtttttggttttctatttttcgggatctgaaatgcaacagaactaaaagttgaccctgctagttgtataacaaagatactgtagaattatattatcaaattatttataagtctatatttataatggcattggaggtacttggttaaaatttgataaagttgccacaaaatgagattggtactcctatcaaagtgctgtgcattacatgctttggtcaaatgaccaaatcagctccacaattttacacaaaatgtttatttcaaaatacttatttaaacaactcatcttatatctttactttctatcaccaatcactgtcttgaaggtatttgacgtaaatataaatagttataaatgaaactaatacataaataaggccaatttccttcctaaaagctaaatattagttttctttcatcccatgaaattttaagaagaaaagtactcttcctcaacaaacaatgaaagaatttgttgctggctgatctgccttacaagcaataccaaaggaagtctttcagctgagaaggaaaaataccagatggtaactcagatctgtatgaagaaatgaagaacactataaatggtaagggaatagtgaacatataagattgcataaaagtgggcagatcacctgaggtcaggagttcgagaccagcctggccaacgtggcgaaaccccgtctctactaaaaatacaaaaattagccacgtatggggggcacaagcctgtagtcccagctactcgtgaggctgaggcaggagaatcgctttaacccggtaggcggaggtcgcagtgagccgagattatgccactgcgacagagagagactccatctcaaaaaataaaaaggtgtatagatatgtatggtaccaccttttctcttctctcttaatttctttaaagatttataattatgtattgtattgttgaaattataacagaaaggtgaaatatatatgacaacattagcacaaagaaagaagaaaagggagctatattggggcaaagtttctgtattttacctgaattgttagtattaatttgaagtacattgtgataaactaagatgcaaattactattcctggagaaactactaaaaaatataaaaatatttatagctgaaaaagacgaaagaaagtaatacactaaaaatagtcatttaatttaaaaggcagcaaaaaagggataaatacatgagacatatagcaaacaaaatagtataatcacagatgtaaatctacccattttgaagattctattgaaaggtgaattaaataaacaattcaatcaaatggcagattgttagacttaattaaaaacaaacaaacaaataggatccaaatagatgccttctgtaacagatacattttcgattttaagaagttgaaagcaacatccaacagtaagagatataaaatatttatataaataacagacaaaataggcttgaagactacaaatatgactagagacaatagggctatagcatatgaataaaaggatcaattcatcagaaatatataataattataagtgcatacacaactaaaacagaaccccaaaatacattaagcaaaagttgacagaactgaaaggagcaatagataatgcaacaataataaactttaatattccactgtcaataattaataaaacagctagacagaaaatcagcaagaatatatgggatttgaacaacactatcaactactttgacctaacagacatttatagaacagtccacacaatgacaggagaatacacattgtctcaagtgccaatgaaacattctctaggatagaccataaaaccattaacaaatttaagaggattcaaataataaaaaaataagttctttggctacaatggaattaaagagcaatgaaaaacaacaatggatgcttgaggggatggatatgccattctccatgatgtgcttatttcacattgtatgcctgtattataacaactgttgtaccccataaatatttatatatatatatatatacaccaaccatgtccccacaaaaattaaaaaataaacaaaatttgaaaaaagtaaaacaatggaaagaaaactggaaatcttcaaagacttaaataaaccaagggtaaagaaaaaaattacaatggaaactaggaaatattttgaactgaatgaagataaaaacacaatatatcagaatttgtgagatgcagctaagtttagaggaaaatttagtgctttaaatgcctatattaggaaagaaaaaagatctcaaattagtaacttgagcttctactttaagaaactagaaaaagaaacagcaaactaagccaaaagctaacagaaacaaggaaatactcaagactagaggatacatcaatgaaattactaacaacataacagaagttaaaaggattacaaagaaatagtatcaccaaatttaggccaataagataacttagacaaaattgaaaaattcttaaaaggattcaaattaccaacatgagtaaaagaagacatagaaaatccaaatggacctattacaaataaaaagctgacttagtaactaaactctcacaaagaaaagtcatattcagcaggttttgcagatgaattttattaaatatttaaataagaaataatatcagtatatttttttacaaacacattcatgagtcaaaagaggaggaagaacttcttatttatcctggggtaatattaacttaatatgaaagtcaaaaaagacatcacaagagtggaaaactacaggctaatagtcttcatgaatatacacacaaaatttttaaaagaaatattagcaacctcaatccagcaatatatagataggattacacactatggccaaaagggggtttgtcccagaaagcaaaattgctttaagatctaaaaatcaattaatgttgtataccaattattaatggaataatagacaaaaacgcacaattatccaaatagactaaaaaaagtatttgacaaaacttgatacttatttatgataaaagcccttaacgaactaggaatagaaagagaaaaaaaaatctatgaaatatctgcagctaatattatacttaaaggtgaaagactgaatactttccctctaaaactggggacaaagtaaggatgattctttcactgtttaccatcaaacattgtatttgaggttctatccaatgtaataaggcaggaacaagaaattgaaggcatgtggattagaaacgaagaaataaaatcatattattcatgtaccatttgacctgaatgtagaaaattcaagaaattcattaaaaatctactagaaataataaatgttttcagcaaagttataggatacaagatcaaaatataaatatcaattgtatttctatatgctagtaataaataatttgaagttaagaaaatagtttagttcaaatcacataaaaactaagaagaataatgttagcacatgaattacaagagttttacactgaaaactataaatctttgctgagagaaattaaagaagatttaaataaatggaaaggcgcagtgtgttcatgaattggaagactcaatattgtaacgataatgactcactgaagttgacttgtagatttaacacaattctcatgaaaatcttatatataacacagtataatcccttatcaaaataccagtaggttttgtgtaaaccttgacaagaagatcctaaaatatatatgggaatgcaaaggaccaagaatagccaaaacaattttgaaaaagaacagaattagaggatttttattaccctatttaaaacatattgtaaacctgcagtgtttgagacagtgtgctcctggcataagaagaggcattctagttcaatcatacagaattgagagtccagaaataaattcttgcatttagttcaatgtgtttatgacaaggtgccaaggcaattcaatgagcaagaataatctttgtaacaaatattggacaattggacatccaatggacaattggatagtcacagaaaaagctgtgaatttaaactcttaccttacaccataaatatacatttactcaaaatgaatcatatacctaagtgtaaagagctgaactataaaaattctagaacaaaatcttatgaacttggtttagacaattcattcttaactataacactggaagcataaagatgaagaaaaaaattaagcttcgttaaagtttaagaacataaaaatacaatgctgaaacgagaaaaatagttacaatcatatatctaataagagatttgtatccagcatataaaaacatttacaacttaatatgaagacacacaacccaatttttaaaatagataaaagatttgaatatagatttcaccaagaagatatacgactggctaataagtacatgaaaagatgctcagcatcattagtcattaggaaaatataaattaaaatcatatgataccactttacactcacgaggatggctgtaagaaaaaagtcggctgggcacggtggctcacgcctgtaatcccagcactttgggaggccaaggtgggcagaccacgaggtcaggagatcgagaccatcctggctaacacggtgaaaccccgtctctactaaaaatacaaaaaattagccgggcgaggtggcgggcacctatagtcccagctactcaaaaggctgaggcaggagaatggcgtgaaccccggggggcggagcctgcagtgagccgagatcgcgccactgcactccaacctgggcgacagcgagactccgtctcaaaaaaaaaaaaaaaaaaaaaagaaaaaagtcaaaaggagaataacaggtgttggagaggatatggagacacaggaacattgctggtgggaatatgagatggcacagccattttgaaaaacagtttgagagttttccaaaaagttaaactgtggattagaaagtaagaaagaaaatcatcgtattcatagactatttgacctgaatatagaaaattcaagaaattcacgaaaaatctactagaagtaataaatatgttcagcgaagttaaaggctacaagaaaccacatactatctacaaacaggtatctactcaagagaaatgaaaatatgtgcttccaagaaagatatgtgtgtaaatattcataatcttgtgatacatcatagctaaaaactaaaacttccatatgtcagccaattggcaaataaataaaacatagaatatccatacaatgaaatattagcaataaacccccaaaaattattgatacatactaaatatgggtaaatatggataaaccatagtcaggcacagccaaggtgaatcaaaaccccaagttgctgaaaaggcccaagaataggaattggaaaatgagtgtttgagttgtggctctgccacctgctgtctgaggaagcttcagtgagtcgggcaactaactggaagagcttcaatatattcacttaaaacatgaatggcttgaactaaattgcgtctaaccttccaaccataatatcataatataatatttaaaacattcatatttaatttaacaatgtatctgtaggcaatgtcattctaccctccaacataatttttactcttctcccgttttgcagtagccacacatgtaggggtggattgagcctaccttctggccactgcagttggttcggtgatgtgaactagaatccaagcctaagccagttgtttgttgcttgtcattttgctggacagagaactgtttctaaagctcaggatgtctctctctgtctcctggaatttcaactataaggcttgtcttgaattgctgctggcgtctctgccccacaactggaagccaacctgagggcacagctgaagtgtagagaaaagcagaggagagaggcatgcagagcaatagtgctaagggccttgatcaagccatgtctgaagccaaacatatctccagatattttattcccatgattaagtatatgcctcttattatttaagagcattctctattacttgcaatcacatgtattatgtctgataaaatggctatgccttaaaaatctaagtcctagatcattagaatcttaaactagaaaggttgaggacgagaacttgttctcccaaacattatatagtactgggtttggctctctgatatgtgactgcgaaatgatggggtgagtgaatttacgcaagactgagaccaaatattttggatatatatttagattacagactccaggacagggtggggattttgtacgtattactaccttaaagatgatgaatagtttttagaccctatttggcagctggttggttgacacctggctgcctggaatatcacagccactcaataaatatttgttgaataaatgaataaatggatgaaaggagatgaggcaagaaattggggggatggaggagagtatgtgttagcatcatagttgtactaatgtgggcaattttgtaatgcaaaagtgggccaaaccaatttgaaagtttcccggtaatccatggccacagccatgatttgcagatctgagacttgcatctctaaaaacaagctataaacattatgacgaagaagatttagctgatgagacaacttgatgacaaaaatcagaaaagaagaaagttggctcagttagagtctttcatgatgtatataattcaggacattctttagtgagcccttcttgctggctcacattgcaatcccacataattatattatgagattgagctccttaattctgtctcccaccttggtttccattgcaatccttagcatgattcattcaagagcaggatatttgcttattgactctggtcttctcttcttataaacaaaaggtccattttcttcagaaatttcccatttggttctctaggactatgtacaaagtaagctcacaaactcttgaaacaaaagaactttaaaaacatatatttgaaagaagaccacacaggtgtcattggacatgaagaagaagttgcacttttataggatatgacaacaatctgccaaaagactgggccttaaatttgaaatctcaggaggagaaaagccatataaatacgttaaacatgttaactgagccttggtatttatgacataaagcggaacaaaattttatagcattcgattccactttttcttcacaaaaactatgtcctgagatattttggactcaattttcttttagtcattcagaaaaagaaacacaatacccctgtatccatttctgccaagcactcaagatggagtgttttctgaaatgttaaaaaaaatgagtccaacataaacttattattaatacaaacaatttttttttccttagactaatcctttcacctacatgatctcattcttctttacagcatttcatgtgataggatatcatgtaatagggctataaagctcagaagaatcatatttcagataaaaatggaagttggtaataaacaaagctggcttgtttcactgaggatggagcagtatagtaaaatgtaaacaccccgaaaactaagcctgggtagaagggttggaaatcctctctaacacaggcaaagacagcgactctcttatccttctactagaaagaaagagtgaagcctctgatttgctgatgacacataatacacccagaattatctccactacccctgtgattgccactcaccttagaatgacaagacttggccaactggcttctgtgtaatgagccgaatgccattttaaagttttattttgctgttggtataaacccaggggaagacaccaatcccaactgaaatctaagaagaaggaagaaaataaatgagatctcagctatgaacgatacatcagcctttccagaggggagatgttggcagaggtcactccggtcaaagctgagagtgaatccctcttcttcttataagaaatctgcgggctggtgttacattcacttgccacaaaagcaaagccttaagtcttccatcagtagcacctggtctactcctgatggatgagcagaaataattaaaggtgtcagaactttctggaagaaatccaggtgacaaaattctctggggaaagtacatgattacaaagtgaacagagcttaggaacacatttcctcgctttcactttatgtctctcctcatgtctccccaggaatatgcaatcatttgcaaatcacttgtcatggcaggaactgtgtctgggctgaaagcctagggaacagaacagtgtggatatggcctccttcccacagcccatgcactttccacacctcaatggcacgtttcctctcaaataacacacagtgcatgcaagctgtgagaaggggcggatgcaggtagggagtcatatttaaaccagacctagcttatgcctgaaataggaggcagcatgtattagttgacatagcaatgacctgggttgacaatttctaagctctacaaatataaggagatgactgtgctttattagcaggacttttgccctcctgcagaaagtctgcatggtttcagtccagactgaatctactgagcaacagaagagacacattgctcagcaggtaggtcctgccacctgttctcccatacaaggctcacactcttctctaaataaatgttggacaaatagttaaacagtactgacttgaagtgatggaaaatgcatggcttgactagaccatctacatttctctctcaccttcaatccaggaagacagatgtgtgcttttcagcacagaaggaaacagcatgaaaacaaacaagcgagcaaggaaaccaacaaatataacaacaaaaccgattatgttgggaacctgaggaaaacttgaggaggaggaggacttgagaacgttctggcactggaaaatcttcacttgaaggaaccagaagacagggaaagaactactccaggaacatttaacaatctagactcatccagtgttatagtaggaaggaactagaaattctggtgtttggaaacattttcttggtagatttcttcttgctttgtattgttcttcaacatggtatagaaagcctgatactgaaacagaaaactgggtacttttcttgttggagtgagggaggcagcaggggcttgtgtctgtagagtcctcttggatgactctcagtggtgaattccacaggaccaaaggtttgaaagaatgcaaattgggctcattttcagatgagaataaaaggcctcaaggttcttattagaaagaatcgttgacctattaaataaaaaacaaataaatccaattcaatgaattaagattttcaagagacgtcagatgtggctcctgtactcatggaccttttcatctgtcaaggaggaaagacgtgtataaaaacatgctttgggccaggtatggtggctcacgtctgtaatcccagcactttgggaggccgaggtgggtggatcacctgaggtcaggagttcgagaccagcatggccaacaaggtactactctactctactctatctctactaaaaatacaaaaattagctgggcgtggtggcaggtgcctgtaatcccagctactcgggtggctggggcaagagaatcgcttgaaaccagaaggtggaggttgcagtgagccgagattgtgccattgcactccagcctgggcaaaagagtgggactctgttagaaagaaaaagaaagaaaggaaagaaagaaaggaaggaaggaagaaaagaaaaagaaagaaagaaagaaaaagaaagaaagaaaggaaaggaaggaaggaaagaaagaaaggagggagggagggaaggaaggaaggaagaaagaaagaaagaaagaaaacatgctatgagctatgcagtgaagagaagcagatcgtatgctctgggagcttacattggagaaagttttcatttaaccatggagatactcagggtgcctttaaacaaggtctgatatcatgggtagcgttggggtctatgcgggggtggacatcaggtgggaaaaggtcaagtggaagagctgagaaacaaaaacgcaaagtgtgtacagactgcagtaggtaattgggatttatattttgtatgaagaaattcctggaaagtaacattaaagatttttaaatgtgagcttaaagaatgtaacttttactctgtgggtgaattaccattttgagatgggaagtggcagaaaatcagagctgagatttaggaagattagtctggcagaggttttcagaatggctgattgaagggacggacttcaaaaaattgaatagtgacagaatagaaagaaaaagacatgtgtgagatgaatgaccactgagttattgttccaacacagtcaatataatgcaaccacgactcaatgagatggcacatgagaaaaaactccattaacttttagtgctaattaaatggcagagaaagaagccattaagggatggggtgctgtgggtcaaaaacttggaattctaatctcaactttgaggccctgattaatgactatgtgtaacaatttccttataaaattaagaggtaaaacagtgtcttgggaagaatcaagttagtaacacaggtttaacctgactttcccagaacttacaaggctgggtgcaaatgcagtccaagtagcattaacaccaaacaaacaaataaacaagcaaacaaaacccagaacctcaaggctgaatccacctcactgcagggcactatgacctcaactccttctgaagtctatgccccttacttatggtactttccagagagggctaccagatttagcacacatgtacaaaagttgcaaaatgctcaggtaaattttaatttcagataagcatgcattttttaatataaatatgttccaaatgggatatctgccttggtcacttctctactccattggtgagggaggagtcccatcttatggttatggggatggtcaaacatatgacacctgacattagagagatgagattggcagcagcttattagtcacatacaacctggtatgggagaactctgcacgccacgcagggccacctggaggttaaacttgggaaccgagtaaacataacaggagccatgggaagcaggctttgtagtatcaagagggtgaggtgagccttgtctctggcaggagaatgaaattggcttgtttgaacaattccatggactggcaaggaactgaagcccattatctagggaaaggcaggcactgtgcctggttttcatgaaaaggagggctgattggctggcaaattttatctgtggaatacagtgaagaggggaacttgcagttaggccatttaagaccctcttagttttaaacattaaggcaacacgtaatactgattttaggtctcgtaccacaatatcattcattgttcatctgaaatgaaaatgtaactgggtgttctatattttatttgaccagcttgtttctgtgggttgcttcacatgaatatccatcagcctcacttttcttgggtacagttggccacttgaaatgctctgctactagtgccattcataagaacctgctctgaggcctttcttgcccatcattaaccacagcatctctgcaggtgtgagcctacgctcctggctctcagggccagatgctttgaaacctgtggcagaatgtgttaggaccgttccatattgatatctcattctttgaatgggcctgaagaatcacagagcctataaccaagactcaagcgtcatccagaaatacaattaccctcacttttgtccttaacctctttatcctcagagtttaaatctaattcctcaggctgacataagacatgaatgcctctccaatagacctttgttcttccccaagtttttcttgctcaaacacaactcttctttcggtcaccaaacatccaaatcctataagacatccttgggggaacatctctgcatcttctctacacggccaagattccctgtaacctggggggttctcaccagagctacttacaggtggctagataatctgtaagatctttttcttctccttctcctcctcctcctcctcctcctccttcttcttcttcttcttcttcttctcctcctcctcctctttctcctcttccttcttcttcttcttcttcttcttctcctcctcctcctcctcctcctcctcctccttcttcttcttcttcttcttcttcttcttcttctcctcctcctcctctttctcctcttccttctcctcctcctccttctccttctccttcttcctcttcttctgttttttgagacaggatcttgctctgtctcccaggctgaagagggcagtggcgccccttcctcttccccttccccttccccctccactgcctcctcctcctcctcttcctcttccccttcttcttccccttctccttctccttcttccccttctccttctccttctccttcttccccttctccttctccttctccttctccttcttcttcttcctcttcttcttcttcacaggatcttgctctgtcttctaggctgaagaggccggtggcacgcaatcatagctcactgcagcctggaactcccagactcaaacaatcctcctgcctcagcctcctgagtagctcccaagaaccacaggcacacgccaccatgcctaggtaattttttaattttttgtaaagataaggtctcactatgttgcccaggctgacctgtaaggtgttaactggtattttctttctgggtctgtgggaggctgagggaatcaagctttgtgttctgcattcttagtgctttgcctcagtgggttgttaatggtttttgtgtaacaggacaaaatgtctcaaatcttagaagcagatattttggtggggagcgtgctctgataagcctaaacgggttaaaggctttacattttttgtttgttttgtaactgacagaaactcctacccctgagaggaaagaagatcttttgtggggtgagtcagggatgcagggttatgagagctgtgactttggaagccacagggaaggacccacttgcttctcatagaaacagctgagctacctgactttaagcaactgtgtgtgcttggaaagtagcccattggggaggacctcaattgttattcattatttacacaacaaatacatattgaggaccttctatgtgtcagctttctggtgagtgcaaaagacatattttactttttggagtctacagtttagtaaatcataatcagtccaagcaatgaatagtgttggccttctgtagttggtcaaagaactcagtgcttctaccaataatttatatggaaacatagaaagtaagggaggtttttaaatatgaccgtgtcatatgcttgcttaaattccttcactggctcagcattacatccagataaaaataattttttttttttagacaaagttttgctctgttgcctaggctggagtgcaatggcacaatcttggctcattgcaacctctgcttccagggttgaagcgattatcttgcctcagcttcccaagcagctgggattacaggtgcctgccgccacacttggcaaatttttgtatttttagtagagacgaggtttcaccatgttggccaggctggtctcgaactcctgacctcaggtgatccacctgcctcggcctcccaaagtgctaggattagaggtgtgagccaccacacccagcctgagctaaagataaaattaatgaatacatccttgaagtcctgcttaatcaggcccgcctacctcctaatactcatcttgctccacactggcttttgttgtctctcccacaggtcttgttcttcctgccagaaagtcaggacacacacggtcccctctgccggagggcccccctctatttctcacctcattaacttcagttgcactgccccatgttgaaaccacaagccacatgtggctattgaacatttgaaatgtggtttgtctaaattataaaatagactctagatttcaaagacttaatgcaaaaaaagacataaaatacctcaatagctttgtattgattatatgctgaaatgatattttggatgtaatggattaggtgtaatatattattaaaattaatttcacttttttcttttttagtaaaacagctctaacaactctaaaaaaagctttaataaagaagtcataaaatctcaccactcaaaattcttgccctagattttgttccctttctcccattctttattttgaatgtatttttattcttttttcctgtttttttaattgataaaaatggcttacatatatggtgtacaacattatgttgtaatatacattgtaaaatggcaattgacataagaatcatctcacatacttaccattttttataatgacaacacttaaaatctagtctcttagcaattttatttttttttataggcgggatcttactatgctgctcaggctggagtgcggtggcaccctaactcagctcactgcagccttgacattctgggcacaagcaatcctctcacatcagcctcctgggtaactgggacaataggcataagccacaatgcccagctaatttttaaaacttttgtagagatgggatctcgctgtgctgtccaggctggtcttgaacacctgggcgtaagtgacctttctgcctcagcctccgaaagtactgggattacaggcatgagctaccacatctggtggcaattttcaagtatacagctattgtaccatgctgtacaatagatttcttgaacatattcctcctgtctggctgaaattctgtgctctgtgactctgtgaccagtatcttcccaatccctcacacgtccctcagtctaatttcactttaaaaaaatatgttttggccgggcgcagtggctcacgtctgtaatcccagcattttgggaggctgaggcgggcggatcacaaggtcaggagatcaagaccatcctggctgacacggtgaaaccccatctctactaaaaatacaaaaaaaaaattagccgggcgtggtggtgtgcacctgtagtcccagttactcgggaggctgaggcaggaagatggcgtgaacccaggaggcggagcttgcagtgagccgagatcgagccactgcactccagcctgagtgactgagcgagactctgtctcaaaaaaaaacaaaaacttttaatgtaactactagatgatctaaaatgatatatgtggctcccattatagacctcttggatggctctgcttagctctctaccctgtcttccttccttcagaaaagtcttccctgccctcccagactaaataaattgctcccatttcatgtcttcatggcctctgctgaccacagctcttagcacactcacctgtgtgatatttgacttatgtctgcaccatcagtagagcattggcaccatgaatgtgggaaccagttttgctcatcattgactctccagcaccaaatgcagttcttactcctttgatcaattcaatatgtatttaaataagtaaatgagtgatgtttacatgaaaggacatttacaattggctgttaacacagagctagggatgaggtctgataacaaaaatatggagacttaaaagttctcatttggctagagaatgtggtcaaatcatgaaagataaagcttaatagaaataaaagcatagtccagtgcatagatttaaaaaatcaattgtatcagttaaggatggggacaagacacatttgagtttatgttggccctgggcttttaattaactacaaactcaatgctagccattactgtgaggctgttattacaagtgataatataaatcctattgtccaggtggaggcaggaatattcctattgaactatctatttgtcagaggaagtctggtgtaacttatatcactgtaagcaacaagagtgattccaaaggaatttagtcagtctgaaaagaagccttgatacctctttacttagcagagccgaacaaaatagaatgtttttcctgaagaattgggagaatatgacattcagttttcaactattagaagttattctatggaagagagacacaggcttttttgcttttttctggatggtagaactaggatctgttagtagcaataatgtagtaccaattttcagcttaatataaagagctttttttttctttttttttgaggtggagtttcactcttgttgcccaggctggagtgcgatggcatgatctcggctcactgcaacctccacctcccaggttcaagcgattctcctacctcagcctaacaagtagctgagactacaggcgcctgcccccactcctggctaattctttgtatttttagtagagatggtaccatgttggtcaggctggtctcgaactcctgagctcaggtgatccacctgcctcggcctcccaaagtgctgggattacagctgtgagccattgtgcccagcctataaagaacttttgaataaaaattccccggggattcagcattttacaacacaaagtaatcagtttcttgttattcataggtatctaagcagagacttggcatagaaggatttctttagatctagctaaataatgttatggggcacctgccagaggcagggaagtctatctcccacagccccgattcactgtgtttgggtgaccctcaagggattgtcaactctgtacctggacagaaggtgagtgagaggctaccatggagccacctgggttgggagctgctgcccaaattccctttcccggaaataacagggcatgtgtgtgcctggcccaccccagggtacagagggtgatggcaaaaggcagaggttttctcccctcagctgacatggcccagttgccacttggacagcagcaaccatcgatgtgtggaaggtcagggatggggaggccaggcagggcctggggccaggagacagagatcatgcaaccagaaacccaacctagggagggtgggaagcagtgggaagggagactaaatgtgagtcaaagctctaagttgctggaggaagttccctggttccatcagatgcagtttgcaaaataacaattcatcgatacaattatcaacaatgtgaagacagctactgcagagcattaaacctcaggccagcccttctgagcatgggtccctgtgtgcatgagtttcagcctactggttttggtcatgaagtcctttcaggagaatactggatggctttttttttttttttttgagacggagtctcactctgtcgcccaggctggagtgcagtggcacgatctcagctcactgcaagctccacctcccaggttcacgccattctcctgcctcagcctcccgagtcgctgggactacaagtgcccaccaccacacctgggtaattttttgtattttcttttctttagtagatgcggggtttcaccgtattagccaggatggtcttgatttcctgacctcgtgatctgccctcctcggcctcccaaagtgctgggattacaggcgtgagccactgcgcctggccctggatggcttattctttggtcagtcgtcagtctggtttggatctgaatgcacagttcaggggataaagatgacaatgagaagaccatgtcagctgcatcagagaaaagattttctgctggaacaggtgatcagatattccaagaaaaggggtggaagccctgctgtgtgaatgatgagagtagctcagccaagtcatacggaggccttgaagaagggaatggcagttgcattgagctgagagagtgaacacaggagacgctacctgaccctggctctcgacttcatctctggtttcagtgacatggctccctgctcacatttgagagatttgtttcatccctaatagcacatgaacacataaaacatttttcttttatgcccaaatcaaggccgcagggctcagtatctgttcttctcacttctctgtggtctctcaggtatttgcccagtgattattgaagaattactttatgcttattctcctgggaatatgaaaaaaaaatcacactcaagttttcattgtctgaatttaaatgataataatttaaaacacacatgtcttaaaaagcaaccaacaccatctctgtttgatcattgtaatggggagtaaatagctctctccagatttcggtcattatacacagttatttgtttctatttattattaaaatattttcctgctatctcatatggaacagcttttgaagattcctgtgagccacagctggaaaattccttctttgaagtgccccgtttattcatcttttgtcagtggcaggccctttatgctcagacatttaacacttttcacagttatttcaaaatctatttcatttgacgtagagtcaatttatcattctgcacacattcccatttctcttttccctcatttctctcactttggcattcttctaagttcatccgagtgccttttttttttcctttcaagctgtattttggagccttgaaaaagacactgaaagccactgcttcaaaatatccatacctgcaatttttctgtgggtcctgattaggcccagagcatatcaaagatgactaagaaaagctgaagactggaacttacgaatttgcctaataataagaccaactgctctctgacataaatcggaagtagttcattgaaacatatcagtttgactctagaattaatgtgtggctgtgattggttagcctgggagctaaatatttttaccccaggctttctcaatggaccagttctgcatatgggcaaaatttgcatcaagttgtctaggtgtgaaatgaaccaaggtgataatcccatcgttctgagactatttcagttttagcacagagtatctctcagcaacagctatacaaaaggacttttttctttacattcattttaactgagtatgactatttttcagttgacttaatcaggagaaaagacaatttagtataatggaaatccagatagttgataccttgggatcattctcttatttggtatgatagcagacacggcataaactcagcaaaaaatgcttacctactagctaacttctggctactaacaatacaaataacatttaagtttgcataaatcttaggaggtaatcatttcgttgtacattgcacacatcggaactctgaggaatttcttttcagtttggaaaaattctcataagagcttcttataacaagcttttattaatgtcatgatacatgctcaactttcatcaatgttctatagatgtttgaaatgtaatataatctatgtgtaaatttaaaatatttaaaaaactttaaattcttaatatttttactgtgctcatttacttttgtctaattggtctatcaaagtccaaaaagacattaaaaatttcattcaaattgtatttttattaatttctctgtgtttgttttatagttacagtggcatctgtaatttggcatctaaatattgacgaccacatcttcaatgtgggttatattttgattgattttctaaaatcagcctcttttcagcacttattattattaacatttgcctcaattttctactttgtctacgtcggaaagcagctcccatgcatgaggttgaagactagataagttgactcctggttggagcagacgttgggacaatgagtggtgggagaatgtcaccctcgagccactctttcatgtcctctctgatttattagaaagactctctcctggtggcctttgaagtggatctgcactgttttctcaatccagctccactgatcttaaatttagcagaagttcctctagagatgtgtcattaccttgccggctggacatagttttcagtgttgtcatgacttttcttgttttattataacagaaaatatgtgtattcaaataatacaaagtttatgactctgggatccaggaatgagaataatcatatcaggtagcaagaagctatggaaacagcaattagacctaaatgcagggattaaaaccctcttagacctcagtggaaagtatctttttatcttaagaaccaggcaagtaatacatttactctgtagatggaacacattggatttttttttgagagtctcgctctgttgcccaggctggagtgcagtggcatgatcttggctcactgcaacctctgcctcctgggttcaagtgattctcctgcctcagcctcctgagtagctgggatcacaggcatgtgtcaccacgcgtggctaatttttgtatttttagtagagacagggtttcaccttgttggtcaggctggtcttgaactcctgacctcagatgatacacctgcctcagcctcccaaagtgctgggattgcaggcatgagccatagcgcctgacccacgttgcaatttaaaaactaggaatgtgggttaagcttcccctatcagtacccagtaattatgaaattccaaagttctaattagtatgacagtgaaatcctacgattccctactatagctaaaaatggttttgctcttaagatctaagtcacagtatttgggaagcaaatgaagaggtcaggttgtttccccagaattagcgtcagattggcagaggatggtcaagtgatatgaggggctgcattttaatcatctacaacagcacataaataattcagacctccatgagttgcttttccttagacaagaataccttaaaaaattccatccctcctatcaatattgcaagcctatttttaagcctgttattccccagaaatactccaatttcttttttctaactcagaactttccaaaagtaaagtatctatcaaaagaacatctgagagtataaagttggtccctctttcaaaggggaatcaaccaaaattgggaagaaatgaagcgttgagtaagtcctgttttagatgcaatcagatctagatacaatctgaaagatggaatttaaaatatttgggcaattcctcatccttatcttcatcacgcttggactggaggtctggctgatgcatgcagcacttaccgtccacaccaaaggaaatcccagatctttacagcacctggagaagaaagtcatcatcttgacacaccatttgttatagtgaaaagtctttacataaccatctgtttcttataaacgtgtttatttgctcaccctcgaggagcaggatcttggctaaggagtccccagtggcataaggaacgtcatgattatcatcagcatcttcaagggctgacgatgaaagccatgctgtttagtttcttcatcatgtaaatcaagacacataggtcttactaaatgtttgttcaatgattcatgtcgatgtagtcaatgtccaaaaattgttttcaatcgcacaaagatccagaggtaaaaacatgaatattttgtagtgtagtgtgtctctatgcatcattaaaataactggtttaaaagtaaaatttataaacatatagcaaaggccaggacacaagggaatggcattcttaaacaccgtgttggggacagtgaattggtttggcatttgtggaaaggaatctagcaatgtctatctacaaaaggtagatatgttctctgacccagcaatctacctacacaaatttgatgcacggaagtgagacctaggattaaatacatgtgtatggaacacctgttgtgtgccatatctgagttggtggcttcacatttatctcatttaatacatctagtgtagtcagaaatgtgtcagttgatttcatggctctttgtaagcaaagttttaagtagttgcaaagaagaaaatttggaacacatgatgccttgaaatttaaaaatttgcttctgtgaatttcacagaactgtgctcaacaaacaaacaaaaaacaaggacaggaagaaggaaaaaagaacccagagataattgtgagcttagaaaccagaatcagttctccctagagactcatttttaaaaattcacagttttaataaaatctactctgaacagagctgtttgtgacatattgccagccgtcagttatttcacttgaagaatttccatgttctttacttccttttcgttcctttgacccatgcatactcacctcaaagcaaggttcttttccttaaaatatgcacacacacgcacacacacacacacacacacacacacacacacaccacctttgcttgtctataatgatatgctggtcgataataatcatacagtttgttttcacatgtggacattaatgcataatctgctttagatcataaacatcttggtttgtgcctagcactgtctccataacatgaagtctggttgaattgccaagtctgtttgtatttccagagctaagttttaactctcccagcagtaagggaacatcatcaccagatcatggggttctagaatctaatgagaagaatccaaatctgagagtcaaatactcaatgtctcatcttgtcttggccagggattttctgcagtgccaatcccttctgtttgattttctttttctccacaatgataatcacgaagtccactccccgccccccagatagtctgggaacccaaatctttgttgtctggatattctcaatctttggttttctcttgacttccttcttattaacatttaaatagaaatggcttgggatatgactgtattttcccccaaatctctagaattaggcagatgggtgggtattccattttcacattcactttgtgagtttctggccctctgaattcccagtggtcctgcttccatcacagcacccaaagctgagatctcacttctgctctgctctgtcccactcacgggatcctctcttcctctatcccacagaggccctgatgatgagagctttaatgatgtttagcaggtaggcagtgagaaatgattatatcacagagaagagaacaatttccaatctaatgtcaaacataattttataaatgtattagctacttcctaagagagaaaccctcctataggttgcatccctttatggaaccttctgcttcagtctctctatatcacggttctcagtctttgctgtgtgttagaatcaactaaagagcttccaaaaatcccagtgcacaagccttaccccaaaccaatgaaatcggaagcatttggggcgggatcaccgacattttcaaagctacccagttgattctagtgtccagccaactttgagaaccactgcttcagatcgttcttatatctgtctcttatcttttctcacacccttgaaggcttctctcccagagttcccaagaaaaccaaaaatttatctcattttattacaatgaatcagatcttttaggtatgtctgtatgtccatttatacttttggtctcatactaactcattcatgatgtgtgcatgggtcttcattttttccctcatgggtcggggtgggggagcaaaaataggctgaaacaaaaggactatttaccccaaagatgaattatgtcactggccgagaaagcagacacagctgcagtcaggttttgtttaaatagcattttttttccttaacagtacacatggaaaaagttccttcagccccctgaaaataaagggctttgcacatttaaaagctctttctgtttgtacagtgcccacttctgcctccttgggagatcagaatttccttctgtgcaagcagtgcgatctcaaagagagctgtcctcaccccaaacacacaaaaccagaccctccaaagtgagacccacggcattcttgcattggtgcctggggctggataaaatgagctgttacgtctttttgatctttaactcctaagattctgactcatctgctcttgcggggagaacctggagcaagctgacccacaggtgtgaactgaacctgactaacctctcctcttgacatgtgttctctttgccttggtgttatttggcgttttaatggacacttttattgagaattggacaagaacagatgccaatgagaaagcatgcatttctacagcttcatctatccaagcttgctctatcgcccaagatttggccattccagaacaaacaacattttcagcctctatccaggtgctttggaggtctcataaagatgccagcgagtgcctgtggttgtgtttttggaagcctaattactaaagcagctagcagctatccaagacacaggattccttcagtcaatgggacaccttgtgccttccacatggacaatataggtggtcttctgaagtcttagaaggaaatagtagttttcttttttaaaaaccacaagttctcacctagaaagttgcaaaatactattgcctgatgataatcgactgttggatgtttctgtaataatagtggtttagtgacaatatgtgcaaatactttgcctttctcatatgtttgagtaggtttaagattatttctattaaaaaaaaactgtctgttacctatattccaatatacttcctccaacctgaaagaaagtcacgaagttacagtgaaatcttgggagtccggcacagcatagtgtagacacacggtaatgggttacacatgccatccatcatgtgtgtaggggataattaatgaggtaacagtcagttaagttccagaagacttcagtgaaaatcacatgaatgatcaccttctttgcacacaagctgtttctttgtgtgggttaagatttctacacctaggaagttgtattctttgtcctttccaatttaatagtaatttatcccttgttctttgagatgttgtgtacctcactggggggtttgggtatggctctagaacaaaatcactgattaaattttcactgagttcaatttattaccaagtacatctttcccagtctaaactgtagccaatagaaaaagactacataattagaactaaatatttcttgatggaataaatgaatttctatggcatataacatacaaaatgtggctgggcacggtggctcacgcctgtaatcccagcactttgggaggccgaggcgggcagatcacgaggtcaggagtttgagaccagcctggccaacatggtgaaaccctatcgctactaaaaatacaaaaattagccgggagcggtggcaggtgcctgtaatcccagctagtcaggaggctgaggcagaagaatcacttgaaccccagaggtggaggttgcagtgagccgagatcgtgccattgcactccagcctgggcaacagagcgagactccatctcaaaaataaataaataaataaataaataaataaataaataataacagacaaaatgcgacctgaggaggttactgtttcctgcgagcacaatgtactctttttttttccattttcacctccctatcatagtacattttcttgcatttctcttactttcagagaagaaagtaagactgctttgataaactgctaagctaaatggtaaaaacaaatctcttctcttgaagcgagaagagtagagtgaccccagccccaggccctgaaaagggataggatctgttaaggcccattgtgggcactggttcctgcatggcagaatgtgtaccgcttgtacagtagctgttcttgcaaagtctgttctccttctcctactcaatacagattgttttctttgatctttttgcagtcttggaaactaccaatcttttcctccttcaactcgcctctgtggatttcatgacactatactcttccagacttgtgccaactcctctgacttctcctttggcccctacactgatttctttctctccctgcttctagctgtcccctagaaagtcgcatagagtctaattattagcctgcttattacttcatgttttcccctgagaaaactcatggcattttttgtcatctctatttcttatcttggtacacttctaaatcagtatgaagagatctcaacatccttgagcctcggttccaaacgaacacttccacccggaagacccaccatctctttttttttttttttttttttttgagacagagtctcactctgtcgcccaggctggagtgcggtggcatgatctcggctcactacaagctccacctcccaggttcacgccattctcctgcctcagcctcccaagtagctgggactacaggcacccaccaccacgcccggctaattttttgtatttttgcttagtagagatggggtttcaccgtgttagccaggatggtctcgatctcctgacctcgtgatctgtccgcctcggcctcccaaagtgctgggattacaggcgtgagccaccgcccccggccaagactcaccgtcattttaagatcaacttaccatggaaggaaattatcacccaaaccttagactgagggcattacccaggcttctgtcagagcaggacaaaacagggcagggtatggaagaaggggttcattatggagatgtgactttactacactgtgggagctggtgaaacaatttttcttgtaccccttgatcctgcccctagtgtttgagcttgaattcaatagaacaagcagttgggaagaaatgatgactgcgatgtgtaagaaagcaagggaaaacggaaacccacatctttttcttgctcttctaagcagccgacttcaaggatgtggtgggtctgttggagcaccgtctcatgagctaaatatacaactagcccagtcttcatctgagaaactgaaggagatgtggcaggagctggaattactgtgggctcatggcagcatgtgtgagctgcaacaggcaccgaaaacagccaatcttgaacacagctgtgttcatttctgcctttcaaatcccacacaagatctcttgtggccaactccaatccagaaccctgcagagaagagagatctgggaccacagctctagcttagtcatgtgcacactgtgcacagtcaccacaacaagtgctatcactggtcctccccatcatgtttcacttttctactcagttgatcaccacgttgttaaaaaaaaaacagcaagaatttggcgctggctgccgtggtgatttttgtttaagtgtgttttttttagagggtgtttaggtgttttgcaggaggcaccctgggggttctgagtagagtaatctctgggcccctcttcccttcttcaaccagaatagttttgcctttatctgctttacatgttgaacttctcagtgagagcccatttgtaggaaatctacctgttggtgcttacagaaaagaaatagggagaggaaagaaagaagaaaagaaagagagaaggaaggaaggatagaaggaagggaaggagggaggaaaggaagatagaaggaaggaaggagggaggaaaggaaggaagaaagaaaaccagtagcccacagaatcaagtcttaattctcccaccttaatcctcccatcttgatcctccatattcattcaactttgtctccttttattaactccaatggaaatcttctgcttttgcctgactgggtctcttacccatttctcaaaagactattcattaccaattttaggctttgactctcacacttcttttttttttctttttggcctagaatgtcccatctcccttgaccttttctaagacaactgtaggccagtgctatttctggatcaaggtagagaggtctagtcttgcctctagaaaacagatgaaggtggcatcgggtgtcatttcatttaaatgcacaaatgcacacataaaagcaaatgcatgcacacacacatatgtgcatatatgcacagatatatacagtaacttaatatgaaaacccttctataaatgactttatatgtataaatttatgtgtaaataatgttatttaatggagataaataaagatgaaaagataccagaaaccatttagaaggagagaggaggaatgttagtagcatttattaagtgcctcctaggcattagtctcatgactttaacctcatttaattttgaaagtaaccataagatgtaggagtcatgagcctcatataaccagtttaatgaggaatctaaactctttgtaggacaaacttgaaacagttttattttttctaattatcttgtcaaccacattctctattctgggcagtggggatgtttaatgacatctcagcttaactctctgacttttcggtctcttggttttttgaagtgtctcatttgggttcttgaaagtcagttctgtttatttaaaaccttccatctaattcctaataacctctgtctttcccttctgcctgggtgggctaggtctgtggttatggtggctttgggagcagaagggatgggctgggtggtcctctctgacacggcgcctccttccctccctatattctgccctccttcttccccttcagttgtggttggaaggagagagtgaagacagtgcctttttactgaatcctgtgaatgaggtcacagctcttgaattgcagaactctatatgctgttttgactcatttctttggactctacatttatgagcagcagctcctgattgcctgcttgacaaggaagtcatccctggcaactcccttaggtatttacagtaccctgtaagatctcttcccattgctctggtatgtgcacctttttgtcctcaggtgagactgtccctagtaaaacagttactacaaatcacatctacccttcatatttgagtttggagttacaggtgtccatcttgaatacttcattgaatctgagaacttgaaggcggctgctatgaactgaatgttttcacctcccccacccctaatttatatattaaaacctaatcaccaagatgatggtgttcgaaggtggaaattttgggatgtgattaggccatgaggatggagcccttatgaatggaattaatgccctataagagagaccccagagagctaccttccccttccaccatgagaggatacaataagaaaagagctgttcatgaaccaggaaacaggctctcactagacactgaatctgccagcacctctgtcttggacttccagactccagaactgtgagagataaatttcttgtttttataagttaccaagtctatggtattttgttataggagcccaaacaaattacaggggcaatcacaaataataaggacaaagtatttgtgacattccgtagaaaaagttactagtatcatgtccaactacctaatccctcattaaaatgcttctgattctgatgagaaaaaaagggaagggtatgaggtgttggtttttattgccttctgtaactccataccactgaatcagtaatggagctcactgggtcatttagcaaatatttaccaaatatgtatatgtaatgtacaccattttcacattgggtatggataactccataaagagaactttacatgtaggtagagaggtagaaaaattaaaaactccactactccaatgtacaaaaaaatagcctaacttttttgttttttataattgatataacttttcttatatggccttatcatgctgtatgttgactagatgcagggaatgctacgtaaactttccaattaatatttcagtgtttggggttttaaacagtccttttatacttatagacctttttgcaaaatgttcaatctatgagagtatcattgatccaactcacccattcctgtccatacatatgagggaccttagatgacctcatggcaatgggagggacctcagagccatgggctgatctcacagttggctgggctgggctgggggtggagtttgaccctactgagggcactttgcaggtacccagagctgtagtctatgatcttggttctttacctctgatgactaattctcaacagtctgtgtctccattttaaatccaagtggacgtgaatcccctgacccttttagcaccttgacatttcatcatttggggtatagaaatttctggctctcttgcacaccatatttaggacatgagccacattcaacagtgttagcaagcttatttgtctaattctctccatctatcaacgctgcactattgatgatctctcaactagaagcaagtatatggttttctcagggcacagttgagaaggcagccactagtcttgattttccagggttccccacacttatatggaaatctctacaaccccctctttttttgaatcagccccgcacatgtggaggagaggatttatatctgatcttcttattctacctcagtcactcttcttcttccccatacttttctaggctggaagcagccagtctcctacttcctgtcaaattggacttcctctacttcatactttcttcttcctagggactctgcacctcatggattagcttcctgcctcaatggaataatgtgacacaggaagagacacaagcttctgataaaggaaagggaatacagtgggtgcagttattaaaaatattattcttatttttcagtataaagaactttttatgtttcatctcaatggaaggttaataaaactttaagaaaatgtcaaggagtttaataaaagagactttggaaggaaaaataactctaagcctctgtaaatcctattgctctaacacttcagccaactataaagaagacctaatacctcaaactgatgaaacatgaagttagatgtgctgtctcttcctgaaacacaaatgcacagtagtttacagagtcttaaagcagaaatctatcataagatgtctttgaacctgcattttcaaagttaacatttacaggtggttcaatgggaattcaaatcaagtgcaaatttctgaggagttcctgaggaataagtaagaattcaaagcatatctttaggtagtaaatgtttaagtcgatacctagttttctttctgtatgtaagcatggggtagaaattccttattcgcaccgtacacgattcctgtgatatgacagctgagattctgaataaaactgagagacataaaatttatggttaaaggtttacactatttctgtgaaactacagctggattaggagatcaaaaataagctaagtttaacaaactccagaaaaatcattatctcagtgaatggatgttttaatgttcattacctacaaagaagtggtttgcttacagctggtaaaaatttagtcaagttctgagatcaacttctttacaaaacatcggttttaactttgaatgaaagcaaatgcttctgtttagctttattttgtatttaacactatctgccatgtgttgtcatagtccctgtcctcaaagaatttctgaccttaggaaagagacatatcattcaactaagaaatcacatgctttgactcttggcacgtctaattctgatggttctatgggattgggttgtaaggggtttcaagcaggtagcatcttagatcaattaagaacaaagcggccaggcgcgatggctcactcctgtaatcccagcactttggggggccaaagcaggcgtatcacaagatcaggagatggagaccatcctgaccaacatggtgaaaccctgtctctacttaaatacaaaaaatcagccgggcgtggtggccggcacctgtagtcccagctacttgagatgctgaggcaggcgaatagcttgaaccgaagaggtggagattgcagtgagccgagatcatgccactgcactcaagcctggtgacagagtgagattctgaaaaaaaaaaaaaaaagcaaagcttgatggagaagaattattttagactgtgctttcaattatagagataaaactacctgctaaagggagtttggggtaacactgagtgctccgtgtttgtcagtgaatgaaaggcaaggaagacgtgaagacccccaccctcatgtgagccacacactggatgttaatacaggagaaactttcaaagaatggcggggccccagtcacagtggacagtagcaatgtgccagtgtagagaagctctaaagttgagaacagtatctattatagcttctgcttgacatacaaaatgcatttttgaagaaaaataaatgtggatccagtaattaagcagttagaaagatgttatttaggctttgttgcatacagatgccaccaattttcatgccaaaacatttttgacctaatcatttttttctattccaggcactctcttgagttgaatcaagagcaaactggcgggcgtggtggctcatgcctataatctcagcactttgggaggctgaggcaggaggatcacctgaggttaggagtttgagaccagcctgcccaacatggtgaaaccccatctctactaaaaatacaaaaattaacctgatgtggtggcactcacctgtagtcccagatacttgggaggctgaggcaggaaaatcacttgaacctgggaggtggaggttgcagtgagccgagattggaccactgcccttcagcctgggcaacagagtgagactccatctcaaaaaaacaaaaaaaaaaaatctggtgcaaaagtttagacatttaactaggaatcttacgcagttctcaccaggacacatgactgttgtgaggcagagtttggtagcagctgagatgcacgaagggttagactgggaggcattgcaaaggcagaatgttgggtcttaggaggcagagagcatatgggggataaagaaaggatacagatttttgaaacaacactcaggttttaaaattgtataaaaggtacaatgacagtgttgttacaagacaaagaaaactaatgttgtggaacagattttacagggggaaggagttgacttgtgctgaaacttgttcactatgaagtgatgtcaaagttaagttgagatatatggttgaaggcatggggtcaggattgcaaaatgagatttgggacctaagggacagtggtgggttgaatagtggccccaaaggtgtttgcatcctaatcccctgaatcttcgaatgtcaccttatgtggcaacagggaatttgcagatgtgattaactcaaggatcttgaaatgagaagattatcttgcattatcctagtgggcctgatgaatcacaggcattcttataaaagtaatgacagagatcagagggaggtaagaggtaaaatgatggaggcaggagttgagtgatgtgaggtaggggtcatgagccaaggaatgcgggcaacctccagaaggaaccagcccagctgacaccttgactttggctcagtgaaactgatttcaagcttccaacctcctgaactgtaagataataagtgtgtgttgttttaagccaccaagtttgtggtagtttgtaacagcagccatgggaaataaactcaaggacctagtgaacactggaaagagaagatcctcatttgctgtaactaaaacacatgcttttcaacgtttggaggtcctttcagttctgtttcaatagcctgcaacagagtggaaagtggcaaaattccattcaggtcacccagaaattcagaatcacataggctgcatgagaacacagatgatctgttgctctccactctctctttttttgacagagagggaaatccataatgagctttgtaggcccaaggcctgttatggtgcctgatacatggtaggtatttaaagtacatcaggctgggcatagtggctcatgcctgttatcctagcactttaggaggctgaggtgggagaatcgcttcaggccatgagtctcagatcagctggggcaacatagcaagatcccatctataccaaagaagaaaaaataaaaataaaaataaaaaatatattattaatttctcaaactaaagagaatttcaaaattttatgttttttaattctatggaagtattttgcccagtataaaaatacaatttacttttattttgcattgactattttgcattacaggacattttcctaagaatcagattttcagttcttaagtcagtgtttctcaagcaaatgttcacgtatcctggttatgcgggggtggatctgtggatatatatccttggggttttaaagacacttatacattactaaagtttgaggaacactgaaatacgcacatgttgaaggaacaaagggataaggaatacatgtttccaaaaaaccagatttggtagttagtttggtggggaaaaaaaatgtaaagcaagccgtttggtggtgtggaaatcaaagaactgattggcatgttaaactgttttatatttcaaactggaacaatcatgtagacgtgccttgcaacacttttctctccactctttgttttctcttttacaatactaagtgtactacaacagtgagaagtaatatcttagcaccagagtacatcttgcacctattatctgtcctggctgacagtaaaaagttaatggcagcatccccctttgggcccctaatagatggtacatcattgtttcagaacacctgaaagaatgtctgggtgcacctccccaagcacctaacgagggaggggtaagggcccaagaaaaattgccatgtcactgccatgtgatttattgcaatgcttaattatgtctacagggcaccatctggagacctaatttgtgtgctttatgagcaaaaattgcagtcaaaatgttccttcttctgaatgtaactgtgtcccactttggacttcttgcacattaaaaaaaaaactgggtcccactttggacttcttgaatattaccttaatgcttgatccctacactatgtcctagttcttttagtttagagggtcccagccacacagagcaactcttattctagaggcaatgggcttttccttcttatactatgttatttaaagggttaaacatgtaggaagttttgtcttataccaaaaactctacagtagagtgaaatcacaatcaacatgtttctgaactattactggccatcaaccaaaagcagtattgcatttattgacaactattttttttttctaattacctgttggcaagtaattgtccccaaaatatttgcttaacagaaatgatggcaaatcaccattacatgatgaggattgcttttgaaatattattcagttttcaaataaattttaacctagtctaggaatctttttaaaaaatcatattactgtgctgagttgatttaagaaatgcttactcctttcaattaaatcccagagcattaatcaaatgtttgacactataaatgtttccaattaacatctagcttaaaaccacatgtgttccaagtgaaattcaaaagatctatctgtacaggtgacctcagagaaaccattaacacatggctggagacagcaagaaacattctccatttgtgagtctgagataaagaatcactttatgactgattagtacttcaaacatccttttctgatgtgggcttcttaaactagaagttgagtatttctcactgagtcaaaaagaaaaattgaattacaaaaacatatacagagagattgaagtttaaaacaatcctatctggatgagccgttagtagttccaaaacctaacaaaggcaaatggttggtcacaatacgagcctaatccgtaatcttaggtctaagagaaattttccaagtttttttcacttcctcatgcagaggttgcaaactcaaatagctccagagtccaagcaggtaacctaaatgaatgaaatgagagtgtcaggtgtactggaggcctcagcaaactaaaggcaatgcctcctgcctaaatgggagagttcccaccctactgcaaccaactattatcatgtgaaaatggaagccctgtagggctaaacattctgctattccaagagaagccagaaaaaatctttttcatgtgaactcatagatttgaaatgatggcaaaattaattcaatggaaaacaaaaacaacacagacctctttccagccaacttgtgacctttgtgtctgctgctgtgcagaactgggaagtggggatgacacagtcagagacactaaaggccaatatgaggatgaagatgatcccctttcagtaatatgtcagcacatcataagccttggagagcatgctttggctggctcactgttgagtccaccaactcccggcagaaaaagagagagcacatacctcccaaacaatttctcaactgatcggtcaaatatagctaaattattccagctgtgctatgcagggggttattatgaccataaggaaaatggtaacattaagacaagcccatttgcccagtgaactgatgaattgcgttctctctctcctgtctctcagtggcctatcaacagctggggttgtctatcccacagtgaggactgctaacaaacacctaggcctagtctgctatggctagaaagacacatatttctctttttccccccttcaaatatctttccagaagaggaaaagcagatgatcataataagataaatgtctggcagtttacacagagagaaatatttgacattcagaaacaatttcaagacaccaagagctattacattcatgtttgtgcaaagatactttttctatctaaagcaaagccaaggcctgtatgcctttggtggaaattgttcaatggctttgaaaataagacagatgatcgttttagcttatcaaggagatgactcagttcataactagagccagaagacttgggtttttgtcttttttttccgctcactaactagctacatggttgttgagtaatttgcattactcttctcatccttagtttaaaaaaattcatcagataccaaattttatatgtaaaatgtaactaacaacacctgagtaaataagatcagataaagcccataaagcaatttgtaaacactagcttgtttctttatttgaattttttttctgaaaatattttctgggtttccttgaggacttatttgattgcaaatggcaggaaacccaattaaaactagcttaagaaaaaaacaaaacaaaacaaaacagacaaaaaaaacgattatctttcacaacagaaaaatctaggtatggactttaggcctggcttgtcccaggtgcatagcgaaaccaccatgacccaatctctctctacatcatagcaccatattggcttcactctgtatggttggattctaggagtttaaggctcatatactgccaggttcaattctacttgaaagaaacaccctccttttcttcatgtaggagtctcaaattgggccagagtaaggtttaatttagtgataatttggtctaactgttcaaaccaatctttgtgtctaaggtagtatgacactttgaatggtcaggtgtcagtcaccgcaggaactcagtcaccatgtgaaacaggggtacaattagccccacctcagtatgtggagtcttttgtcaaaaattggggagaatggatgtccattatactctatgacttgatacatacttttagagttttggcctaaagcaatagtttagacaccttataccttaaatgaaggttaaagaaaaatctgctttcctaaagaaactgcctttgcctgatattcctttctttgactgtaggaaaattttaaaaatgattttgtccaaaatgtattctgctaaaatcagttcttctgaattaaagggaattttttttttcacagaacagtttttctcatgactaacgtaactttttttcttttttttgagataaatttacatatcacaaaattcaccctgttgaagtgaacaattcagatttttaaagtatattcacaaaattgtgcaaccacgattgctagctgattccaggacattttcattgccctaaaaagaaaacctacatccatgtgcagtcagcatccatttactttacccccaggtcctgataaccatgaagttaccttctgtctccagggacttgcctaggctggatatttcatatgtgcctgtatcaaccacatggtttattttctgtattctgaaaatttaacatctggggttttgctaatcctggagggactgctccttctggtgttagttacccagttcctaaagatagtaagcaattcgcctgtttttcaaatgtggatcaaccaactcacagcctattcccccagccaccttctctatggggctctcacaccatcccttgtgctaatcatcccaggctatgtaccaggcaattagtgtcagcccttgtactctagagcctgataaaattcttcccattagccgatctcaagcctgtttaccttaccttgcctgtttcttcccatggaaaccacaataaaggtccttgcccacattttccctttctttctgctgcctaagtaacccagatgctttctcatgtggccccctgtggtgtggcatgctctctcctcttgggaactgtgaatagcaagccatcttttcaatggcagtcatctgatgtgttgttattactatatctaagtaataataaaacctatatgaaaacattatgtaaatggggtcctacaatatgtttcatatctggttgctttcagttaacataatgtcaaaaccttcaaaaaggtttgtaaaccaaaatgtgtctgagacaagtctcaatcaatttagaagtttattttcccaaggttaaggtcatgcctgtgacacagcctcaggaggtcctgacaacatgtgcccagggtaattggttttatacattttagggagacgtagacatcaattaatgcatgaaagacgtacattggttccacctggaaaggtgggacaattggaagtggagacttccaggtcataggcagattcaaacgttttctgattggcaactggttgagttactatctaaagacctggaatcaataggaaagaatgtctcctttaaggtaatgggttgcggagaccaaggtattatcttgcagatgaagtctccagataacaagcttcagagagaatagattgtaaatgtatcttatcatacttaaagagtctgttctatcagtctttgcttttttgggtgggggagtgcggagtctcagtctgtcacccaggctagagtgcagtgacaccatcttggctcactgcagtctctgcctcccaggttccagtgattctcctgccttagcctcccgagtaactgggattacaggcatgtgccacctgtctggctaatttttgtatttttagtacagatgcggtttcaccatgttggccaggctggtcttgaacttctgacctcaggtgaaccacccacctcggcctcccaaagtgttaggattacagacatgagccaccgcacccagcctgttctatcagtcttaaggtctctgttgatgttaatggtaatgaggcatgtctgactccctgttcccatcatggcctaaactagttttttaggttaactttagaatgcccttggccaagaagaggagtccattaagaatggctggggagcttagatttttatttttggtttacagtttcatccatgctgtagcatatatcagtactttcttccttttatgactgaataatattccaccatacggatatatcacattttgcttctccattggtcagttgatgggaagttgggttatctccacatgttggctattatgagtaatgctgctctgaacaaacttacagtataggtttttgtgtggacatgtgctttcaattcttttgggtatatacccaggattggaattgtaatgtcatatggtaactctatagttaactttctgaggaattaccaaactttttccaaaggggctgcagagaccattttgtattcccatcagtaatatgtaaaagttgcaattcctggttttgatatgcatttccctaatcaatagcaatgttaagcatctgctcatgtgcttattgtccatatgtatttatatattggccatatatttacctgcatataatttctggactctcaattgtatcccattaatctctagatctatccttatgtcaataccccacacgaccttgattacttcagggttgtacactaccttttgatggtgttcaggacgtgctacctaccccgaaatatggcactttggcaattgagaaaataggagaaattggaaggtcactcttaccttcccacatcttttcccctgaagcaggtcttaaaacctagaaagaattttctgatcttcccctgaaacaggccatacaatcttcacttgagagctgccctctctatacccagaggaaaggtgctaaagacacagagataccaagaagaatttgaacagacaggctttgttaagttctccccgatgtattatcattaggtcatacttcctttgtccaattatatttccccacaactgttcactcttcctcaaaccaaggtataaacatacacaggtttccttatttatttgggtcttcattttctcgtaaagactcccttatcatgtaaaacccatattaaataaattttgtatagttgtctcctgttaatctgccttttattataggagtctcatccatgaaattagagatgggtgagcaaagtcaatctcttctctcttatactttaaattccaccataatgttttgagataagctttcttgttttgttgtcaaggtaaattagtaaaattatttattttctgctttcagcagatgatttccagccactgccagtttctctttcatatatctgatgaattttgtgttcataattctatgattctctcgttaggagcttgaagctatatttctacaatattgtgatttgactcccctaaactttatactcaggttcctatatttctgtgaggcctacaaagatgcttccatacttttaatttcaatattttacttttcaaaacgttaaacattttcattgccaaattcaattactaaagttcatattaaggcttgtagcgattcatactaaggcttgtagcaattcatactaagccttggttaaaattcagaacgcttacttcctctctagtgatactattaatgactaattgaattgttattcaggagggaatctggggctataattattccatatgattttccaaaaatctattttttgagttataacttacatatcgtaaaatacacccacttaatgtatagaattcaatggtttttagtgtatttagtatatttacagagttgtgcaactattagcataatccaccttttgaacatttaggattttcatcacttcataaagaaacctcctgactcacagccactcttcattccctccaccctgccagaccaagctaccagcagtccattttctctgtctatagattagtggggcttcctaggattggctgctgggtcaacgtagcttagtgttcagccactgtttggtcagaggtggtatttaaggccccttttatggatggaaagtttgtgtttctccctccaaattcatacaatgaagtcctaactcccaatgtgatggtatttggagatggggcctttggtagataattagggttagatgaaatcctgaggatgggaccctcatgatgggattagtgccttaacccattagtgtgtgcacatggagccaactctccccctctctctctttccatctgcacacactgaaaaaaggccatgtgagaacagaatgagaaggtggccatctgcaagccaggaagagagccctcaccagaacccaacttcgctgttgctctgatcattactcttagcttccagatcagcgaaaaaattattttttgttgtttaagccacccggtctatgacattttcttaacagcagccacagctgactaagacacttccaggagaataagattttcatcttttactgttggatcagtacgtagcttggagactacgtccgcggttcagaaaatttataagtttgctttgcaggtagccagggattgtaatcgcctgatgagtccttccttcctgctgcacaggcaaagccagttcattgagaccaatgaagtattgcattgaggtactgcaggtattgtggtaaagtaaatacttcactgaggcttttcagtaaggaaggagtttaattgactcaaggctggccactccagagatggagttatcactcaaatcagtcttctgaaaggctcatgggttaggatttttcaattatagtttggtaggcaaggggctagagaatggggaatgctgattgttttgggataaaaccatagcaggtatggaaaacagtgcccatgcactaagtccacctctgtgtgggaatcacaggactttttgagtcaggggtcataattctgagtggagtcagccggttgtcataaatgcaaaagtctgaaaagacatccctaaaggccagtcttagagtctacaatagtgatattatctactgtagtaattggggaggttacaaatcttgtgactgccagaacaatggctggttattgtttatgcctgcatcttagcagaattcaggcccctctcataaccctagacttgtggacgtttattagttttacaaagacagtttaattttggggagggctattatcatctttgctttaaggttaaactataaactaaattcctgtcaaagttagcttggcctatgcccacaaatgaccaagggcagcttggaggtcagaagcaagatggaatcaaccttgtcagatttatcctactgccataatgttgcaaagtcattttcagggctagtagctcagaagttctctttcccattgctactgagatggcatagccttgagtatgctcatggtcttccccagaccactagacaaggctgtgaatttagcaggatcgtctttgaccatctcttaccttgcactccccattaaacttctggcttttgggctgccattggtgttaaccttgagctgttagctaccgctgatagccagctgattgctgtattgtttttgaccacatcctgggcatacatttctccttggtcttatccaaattaagtatggccgcttgggtttactcagattacatcttccccaccctatggaatggggcctgggagaggagatagctactctttgctagctgtcccatgcagagttcccatccccttctccagtatagattggattatattgtcagttcttcttatagtatacgtctcagagagcttgctctgagatatatctgtcctcctaaaaggaagagactaaagctcaaagtatcatttaaagagtttacttgagccagagtgaggactagggacaaagtgagctgctagggacataattccaaattaccttggggagtgcttcatcagcctgtgttacaggcaggtttttaaaggcaaagggaacaaggagtgggccaatacaaagctgttgaacaggaatccttgtttgtttacagataacattggttagtaattggctgtacattgttgaattatagggtatgagttacagtgttcagcgtatgtgttttatggctatttggtatcagttagtctggagcccacatagtaggtgcattcaagagataattatttaggtcaagagggaatgaggcatgactgctgtttcattccaatgcctatctgatccaaaggggctcacattcctcagatgaaaatattgatttttcttctttctcattttccccttttgataaaaagcctatctttttgaaagcactggcaacaaaaatatgagcatcaacgtgtccctctttactgggaaggttcattcccagatagtcctgaagaatctttaaaagtgccccaaagccaagttagcattctccattggcataagtgagacctcaaccaagtcattgatttatataactgctttgtttattgagtctcgtttggtctttggaattccatgattttagttttcttggaagaagtaaaatgagggatacataacattagtaatacacttacgaattacaattaaaaaaagtatttgtataccagaacctattccattaggaagccaactaaaaaccttgtaaagaaaattaaaaccaagtttttctttagagatttgtaatcaggaaatgattcaagattcagtccaaattgtaggatactaactaataaaaactcaaaaacaatggtcagggctagaatgtaataacaggtgtactatacttttcttctgaaatattttttctttcttagatgtcagctctgccattatcttccctttgcttgtgtttgcattatagacgctatcttctgtccgtctgatttgtcttttttttttcttttctgagacagagtctcgccctgtcacctaggctggagttcgatggcgcgatcttggctcactgcaacttccgcctcccaggttcaggtgattctcatgcctcagcctcccaagtagctgggattacaggtgtgtgccactatgcctggctagttttttgtatctttagtagagaaggggtttcaccatgttggccaggctggtctcaaactcctgagctcaggtgatccacctgcctcagcctcccaaagtgctggggttacaggcatgagccactgcgcccggcttgatttgtcttttaaagttattggtgatgttgtgaaaggtagctgaattgaaattggataatgtcatccataaatacacttgacctggcccttggaaactgcaggatgtcacaatgtgctgggaggcaggcaaacaaatgggtgccattgtgtccccatgcatgcagtgattttctctgtcgtccctcaggacatttcagggtgacatgtgactggagggggactcagcccatgtaaagagaaatgcgtcaacctacactttaagtatgaataaaaattaatacaactttttggaataaaaattaatacaaatggaaatgttacatttttttctttcacctcaagattgccttgtgtacttcctgggttgcccacacctcaggcaatttggagatcattcatctcaaagtctgtgcaccagtgtttctcaatcttggcactgttaatattttggacaagagaatcctttgctgggggagcttccctgtgccttgcaagatgtatagcagcatccctggccctcatccactagagagtaggagcaccctccctagctgtgacaaccagaaatgtctccagacattgccaaatgtccctgcagggtggggagcaggaaacaaaatcatccttggttaagaatcactgttgtgtacagagtaaagccatagacatagagttgctcacacttaacatcttctgttgtagaaagatatatccgctgctcatacggatacattaaataaccacagtgtgcacaccctgaagttcgcctgtgttttctgatctcttggtatcaccgtataaacacatattactatagaaaatttgaaaaatagaagacacaaaaaagaaaatttttaaaacttataactgaacctaaatttgttgtgttttcttacaattatttgtgtagaattcattggctggttagctcttccttcagtttggtcttggttgtagcatatctttttttttttttttttttttaaattttgagacggagtctcgctcttgttgcccaggctggagtgcaatggagcctccctggttcaagcaattctcctgcctcagcctcccgagtagctgggattacaggcatgcaccaccacgccctgctaattttgtgtttttagtagagacacggtttctccatgttggccaggctggtctcaagctcccaacctcaggtgatccgcctgccttggcctgccaatgtgctgggattacatgcgtgagccaccgtgcctggctgcttgtagcatatcttaaagaaatgcatttatatttctatcaagtaatttgaaaattctaacatatgaagtccatacttttccagttgtcagcactggtagaaatcccccttttatgtagtcttttagttggacttttggagaggaagagaattaaagatggaagctaaacatgacatgaaagacaaccattaaaaatataaatgtgttttactgcaatgaaaaaattaattagctcaacctccaaagcacagtaaacaaaattaatattcaaatgaaaaaaccctgagaaaatatttacatctgtaaaatgacaatattaatagtttcttaacacatagaataaaaacgaaaaacataaatatataatggactttaaaaagttgaaaaagacaaatattctactagaaaaaagacaaagtaacaattcaaaaataaaaaatatgagatgtcattttcttacaagatagaaaagatttttataataatgccccttgttaaacgaaaagtctgttacactggtgatggaaatataaattgatacaaggcttccaaaaaataatttgagaataggcaccaaaagctttcaaaatttacatgtacagccttataaatttacttaataattctactaggaacttattctaaggaaatacgcatgggttgatgtgaaaaattcaccataacaaaattcatcagacccatcttcgtaatagtagaaaatttaataattacttaagtgttcaatattaagatattttaaaataagttatatggcagcaccctaaaccattattaaaattgtatcttagaaaactatgtaatgttatgaggactagtcacatgtattaagagaaaaatatcatatggtattatggtataacgccaaatagtaaatataatacatttttgtaattttaaaagtttccatgtggaaagatctacaccaaaatatccatacctctgagtagtgactatcgtagtttatttaaactgttttctgtttttccatttatattttcaaacatttccacagtaaacattcgtaataaaaatgctaaaagttgttataataatactgcgaggctcttgaaacatttttttggttcagaaagaaatacagaacagcgttttcctttccaaactgccaccagctgggaaaatcatcatgtaagttgtttcacacaacacgcttcatctgagaaggaagcaaatcttgagaaggaccttatgttcatggtcaatgatgttcactcagggatccttttcatcgttttccccacctgtgccaagcacgtccaccttctgcttaagcaaaactctttctcagccaggagcacatcggtatattgaaaagacgacagcggtacttggaatgaaacttgaatggattttcagagaaaacgtagttattatacagtatctaggaaaatgtagttattattcggtatctagtggcatttttttttttttttgagacagagtctcggtctgtcacccaggctggagtgcagtggcgccgtgtcggctcactgcaacctccacctcccaggttcaagcaattctctgcctcagcctcttgagtagctggcaaccatggtgggaggcgcccaccaccatgcccggctaattttttctatttttagtagagacggggtttcgccaacttggccaggctgatcttgaactcctgacctcatgatccacccacttcggcctcccaaagtgctgggattacaggcctgagccaccgcgccaggcctctagtggcattttaatgcggtggtggcttaggacggatacaaggctcctgaaactgaaagttctgactatccaagtgaaagtgattctgatgaggaggaaataaaaggtgtctaaagaaaccaatgagctgtccaaggatctaattttcagtttcatatcaacagtggccacctttgtcttgcttctcactgtatttactatggctaataaagttcctggcatataattagtgctaaaaatagttattaaagaaatgaggacatattttaacacaacacaatatatgtaatccaatacaaggaagggagtatagaaaaatcaagtagaaggggaagaaattaaataattggaaaaatagtgtagaatgagacattcaaaaatattaaatgaaaattaaataactaaatgttagaaacagaaaaaagtatcataaaataaattatcattttagagacagatggtataatgtgagccaaaaataggcttcagatattcttacattcattccttctttcattttatatttttctcttcctatgctccctttcttctccttttcttttcttcctcctaccattcctaccaacctctctctttctttcccttcctccctctttctttctctccctctttgtgcctgctttcctccttccctccctttctttctttccctttctttctctttctttccctttctttctctttctttctttctttctttctttttctttctttctttctctttctctctttcttccttccttcctttcttctttcttttttgttttctttcatcttccctcttttcttttcaaatgaatttgaaatctatcccatgccagacacaagataaaccctgtactttataagtatcagttttactcaaagatcctgaaggaaatcacgccacaagaagcactaatacattttatgttgaacgaaaaaaaaaacatgaattatttttaaacaattaacaaataccatattggctttgagtgaatccaaccgctatgagatcattttggacccctcggtgattagggattctctggtggttgattttgagaagccctgctttacacgaagaccaagaatgcacgcatatccaatacacgggaaataaagcttggagagatggttttatgttgcatgaaagagtcaggatttataaaatatctataagctgaacttaaacagtaatataaaaggattaaaattgttcaagaacaatacacaatcatctactgaaggaaaagatggaaaaggccaggcttcaacaaaagtcacaagacaaggattttgagtaatacatacttgatacagtccaatgatggggtgaatgaactaaagaaaggcttatggattgtaggctgagttcatagagatggagggaaactgttttattccaatcacatctggtgggttgtattcatctctgaacattatttatttatttatttatttatttttgagactgagtttcactcttattgctcaggctggtgtgcaatggtgcgatctcggctcaccgcaacctctgcccctggggttcaagtgattctcctgccttagccttctgagtagctgggattacaggcatgcaccaccaggcctggctaattttgtatttttagtagagacggggtttcaccatgttggtcaggatggtctcaaactcctgacctcaggtgatctgcctgcctcggcctcccaaagtgctgggcttacaggcatgagccaccgcacccagcctgaacatcatatttgaagaaagccattgacaaattagaacatgctcacagaagagttgtcaagacaatgacaaagacttgaagtcgtgctacctggggcaataaagaaagctgtcatcttaaacactactgtgaccagtttaatggttcttctcataccaccatgtgagttcactagcaatcccaaaacagtgaattaacacaacaaaaggttatttctcattcatattacacatctgtcatgggttgatgggggttttgctctacacaatcattcgggtacccagaatgatggaggctggctccaccatctaatactggcatcatatggaacattcagcctcatcagtcacatggcaaggtcagagacaatgggaaagttgcacgcaagctccagaatgctcctgccttacagtaacgtgaccccattgacctgtaaaaaactggaaaatatgggcaagtatgtaacaccttattaatattttattttattttattttatttttgagacagagtttcgctgtgtcacccaggctagagtgcagtggcgcgatctccgctcactgcaagctctgcctcccaggttgacgtcattctcctgcctcagcctcccaagtaactgggactacaggcacccaccaccgcgcctggctaattttttgtatttttagtagagacggggtttcactgtgttagccaggatggtctcgatctcctgaccttatgatctgcccgcctcggcctcccaaagtgctaggattacaggtgtgagccaccgcgcccagcctatttaatcatttttaaatggtgtaatgcttagctttctatggctttattctcaaccttaagaatagtagctgggaaatcatggatttggtctgctattatattttctctaaaatgtgttaaaataaatcacttttagaattacagaatttcatccatatgccacctaaaatcattctacctactacacagtgtgtcacttttagaggaaaaactagtttgttgaatgcaatcaattgcagtagaggaagaaggaaatgaggttacatgggaaggactgctcaaagagactgtgaaatgctgtggggttcctgactggaaatttgggatcaaatttgagaaaaagaaaatgacaattatgtccccagactaggacaatcattctgtttttttgttttgtttgttttgattttttttagatggaatctccttctgttgcccaggctggagtgcagtggcaccatctcagctcactgcaacctctgcctcccaggctcaagcaattctcctgcctcagtctcctgagtagctgggattacaggaactcaccacaatgcccagctaattttttgtatttttagtagagatagggtttctccatgttggccaggttggtctcgagctcctgacctcaggtgattcgcctgcctaggcctcccaaagtgctgggattataggtgtgagccaccatgcccggccaggacaatcattctaacttggaaatattgaagaagatggaaatgcataagaattcggctatggaaggttaataataatattaaataaatggaacatcaaagtgagtttcaaaattagggttttaaatttccacttaaaaaaaattttttttttaattcttattgagacatggttttattctgttgccccacctgaaaaacagtggtgctatcactgtattccagtggctcactgcagccttgatctcctggactcaagtgatcctcctgcctcagcctcctgagtagttgggactacaggcgggtaccaccatgcccggctaacgcatttacctctttcagagatttgaattagccatttaaccaggctgagtagttgaataagtaaagctgcttcactcaaaaatctctttcctttgatgataacgatcagtggtatttgttaccaaatgttgcacaaaattcttttcccacagtatctcatttgatctttgcaacaatgctatatattagatttgattaatattcccactgtatagatgaaaaatctggggcctatttacagtgaaatacttgcccaaggtcacagagctgaagctgaatcctaggtctttaactaaaatccaacccttcaaaggaactcaaatttcccacctggttttaggggttttcattataatctttctatcattttcttgtcttttactatctttttggatataagcaaggtgtaaacagcaatagttgaaaatttacagagtcagttctaggttatcactaactagggacctcagttagattgaagtgggtggctgggatgggaagaacttttctatttaacttaagactgttagatagattttctgagcggttattctgtcttgtttcattttcttacttttatgttttctttctttctttcttttaaacatttttccagtctaaaagccagaatcaacaggatcaaaaatcaaacaaaaattctgagcttccctaaggacacacatgggggatttgagaatgtcagctgtacaaatatgacgccatctttagacaaactgtctggaaggatgggttgggggggtggatccagctcctgtgtgttgcatgcagatgtcatatggccatgcctttagccagctttattatctgacagatacggagcacaaatattgacttttgctatttttactgtaactgcagccataaacattgattacttcaggagagtgcagacaggaagaaggcagcagtgtctccatggcccaagagagcttttgtctttgccgcagggcagcccaaaaaagagtaggactgtgcatacgatccttatggaatgattcaatacagaaatagtaaaatggtgatgatgtgaaagatcccccaggtttgagggacttaaaaatatccctatgggttctgtattgtcatctgtgttcatttagcccaagcaaattctgaatgcaggaaagaggggaacttaagagcatttaaaagccttcctccttccatggtgcatgcctgtcttctgggcagacttcctcctcttctgatggcaacacacagtaattgataattacattttccaatttcttcccctctacatcccagaattatttgcttggcaagagaaataatcaatcaatcaatgtatattgcgttgttggtcctttgtaggaaatgaagggatgcctcttttgatgacaatctgtttatttggcagatgcaaaaaaaaaagcaagggagattttctgatctagtcttttcatttgtttgttttagattcagagcctaaaatttatgtttcctgtgtggagtaacccagatttcctgtttgattaggtctaatgtgttctgcatgagcttctggagctagaaagatcatagtgaacattatggacactaacaggatgatggtgggacagacagccagaaacttgaaagtgggtctagaggatgactggtttccatctgcaagaaaaggtctgttgccccctagtattcacttcagctgaactcagcatctcagccaggcactcaaaggcttcaataagtttaaagcagaagagtctctgtctcaaagtgcatctcatgccagcgcccaactctggcctaaatcagcccaaagtaaaccgacttgaactttctccagagattcagggagtaagaatgaaaccaacccagacacctttaggggtcaaaaatcattcagataggtacagaagaacaaagcaacgaatggctcctcatggcccggagggggaagggggccgtgcgttgaagatggaagtatgtattttagggtttttttggttttggttttggctttttttctgttgttgttgttgtttttgagatggagtctcgctctgtggcccaggctggagtgcagtggtgcaatctcggctcactgcaacctctgcctcccaggtttaagcagttctctgcctcaacctcctgagtagctgggaatacaggtgcccaccaccacacccggctaatttttgtatttttagtagagatggggtttcaccatcttggccaggctggtcttgaactcctgacctcgtgattcacccgcctcagcctcccgaagtgctgggattacaggtgtgagccactgcacctggactattataggtattttaataagaagttaaatcttttcatatggagtctggctgtcaggtggcttaagacattgagcacatttgcaggactggctctaccaccaaacctgctggtatctgcctttagaagagtcattcattcattgattaaataagcttgacggaggagtttccacccataagtggggtagagcatatgaacatatcatgtagaggaaagggcatggttttcagagtcaagcagagttggaagcaaatccaagttcaaacacatacactttgtgtaatttcataaagatttcttgtttttattttgagccttgttttcattatctataaaagagaaacataacatggttgttgctaggctgaaacaaaataatatttgtacagtgtttagcatatactgtaaccaaaatacctaagtcccctctcactactataattgcatagcaacttcttcattttccctttaccaatatctgaactctcttactttggataactgttattagataacaatgaaacaatttttgtgttcaaaagtgtattttatttaagtatgtattttggttatcaaaaatgttgggctattttgtaagtttgtggaatgatattgacattaattattaggccaattggttatagtaagagtaaagaaagtttactctttctcttcattttcatacctcatcccctgtaagaaatattaatcaataaaatacagaatggtatctaccaagcagtttatagcatagtttgggcctaagcttaaatttaaggcaattcagtgggaccatttacaatgtcttagaaaactggctgacacgtcctatttgcagagaagactgaagaagtaccctgtttgtttaaaattaacataaaatattattctgcctatctacctttgcatgtaccttgtagatcaccttctttgagctttagtaagatgagtagaaagatgctatattttggagttactctccaccactggttgtataatccaccatgatggggaagctcttttccagttcccagcctgtaagacttgctgtaatttcacacttggtaatatgagcttgttttctggatcatcagtgttgggggaaaaaaaaaaaacaacttccgttaatggatggcagtctctagaattttccattgagattgagtaatacaattcattatcctagttatacatcttaggtctctacttggaatcatgaagttctttaaaccaaaatacctaagtccccatttactgcaataattacatagcaacttcttcatttcccctttaccaatatccactgaactctcttacttttggtaattgttattagatagcaatgaaacaattttttgtgttcaaaagtgtattttatttaaatattcattttgactatcaaacataccaaaaatgttaggctatttttgtaagttcatgcactgatgttgacattaatcattaggttaattggttgtagtaaccagtttattccaataccgagtcctgccctcgaccaaattagtaatataatgtgttatcctttaataagatgggcagatggaaggcgcaagggcagggtcaagatatatgataaacttaagctcaaccagttagaacccagggccagggtctagttctagcaggggaaaattggtgaagacaatcatacacgctgggtggacaaactgttcaccgaatttctaggcctacgcttatgctcagcttcatagagtaggaagctatttatagacctttctctaccccagtggagaaggaggtactgtttgtatcatttcagggtttcagacaaatatgaccataaggtggcttgatttggatagaagtggccttacaaggatacaggattatttaaataatatgaaaatgaacactgcatttgaaatcaaaatatctgtctttatttcaggttccaccaggtgaccaacttaaagctctgtaagctttggtttactcatctgtaaaatatggatagccatttacgctgcataatgttcagaggattaggtaaaattatgtaaaagaaataaaaaatatggctgggcgtggtggctcacacctgtaatcccagcactttgggaggccgagtcgggcggatcacgaggtcaagagattgagaccatcctggtcaacatggtgaaaccctgtctctactaaaaatacaaaaattagctgggagtggtggcacacacctgtagtcccagctactcaggaggctgaggcaggaggattgcttgaacctgggagatggaggttgcaatgagccgagatcacactactgtactccagcctggtgacacagcgagactccatctcaaaaaaaaaaaaaaaagaaagaaagaaagaaagaaaaatacaatgtacatagatggtctatttctctcctctatccttcaccaccttcactaaacattcaaaaacctttgatgactttctgctaaagacagttaaagccaaagatattagcttgctattcaggatcttaacttgccaactattatttcccactatttttccccatacaaatttttagcagacaacaacaaatctatgtttcccttggtgagtcagttgtagttgagaggtctcatgagggaatctgcttgcccaattacgcaggacatcacctctcactttacacctgggaaggagaggacctttggctttcagatgtgggcgctccatgtgatcagaatcctggcccgatgcctgcccatggatcatgctaaacaagttcaggagagtttgatatgtgagcctgaaggccagttctttaattatcaattttttatatgatcctacatcagtatcctcatggaagttcacactataataggtttgttagacgactatgaaatcagagtggctgggcgcagtggctcatgcctgtaatcccagcactttgggaggctgaggtgggcggatcacgaggtcaagagttcgagaacagcctgaccaacatggtgaaaccccgtctctactaaaaattagccaggcgtggtgacacgctcctgtaatctcagctacttgggaggctgaggcaggagaattgcttgaacccaggaggcagaggttgcaatgaactgagatcatgtcactgcactctagcctgagcaatgcagtgagactccatctcaaaaaaaaaaaaaaaaagagaaagaaatcagaggaaaaaaaaatcatttgataatattgagtgtgatcctacttcaattatgtgtcatcatcaaggaggcccagacctcagtggaaaatggatttgtgggtgcccctgagaagctttgactctcttgacagagctcaagggggtgcagttgtcactgggtgggtgacatgagtgggtgggacctggaactgctctcaggcagacagtctggtagacacgagacatacaagaaattaaatgtgtgtgtgtttgcaggggcccgtcttaaccaatcccccaggtggctcctactggagagaaaaaaacaatgtcgtatttagccatgggcaagtgtagaaatggaggctgggagaaatccctgcacacctttctttggtcagctcatgagtcattttccccccaataaacagaaacaccacctaaaacaaattagatcacattgcttttcttagtagcatgtcatatattttcttccccacttgtccatgttctgtcaaagatgaggaatgatcttgcagaactcttggagctgagagcagagtggagccaacctgatcccgtaagccgacctggaagcctcatgggaaattcttcttgaaacatcccagccccatttcagggcctctgtgcttaatctgcagataataatctcagctccttacggcttgcccatcacctcatctatagtgtttgccactcttagtttttgtcaaactctaaggagttggggaaaaaacattttggggcagatagttcaaggaaaagtcaaagttgagaggtgacttggtttttctcctctttcccacactacagaccagaaaactaaactcaaaataatagtatgaatgcaaagaaaatcaaaccatcctgactcctttgccatgtttgaataatcatgaagactcttgtaggagttttccattaattcaggaagcccgctctagcttttctgcatgagtttatcagtccctattttgtcgtaaggtctattgtgttttctccactattctaaaatgcagctgcgttatcactgtatatgcagtataaatgtttagtcacctctgagttatcaactggaatgctcctcagggacatgtcactgctaggtgaaatgggggtggctgagtggagtggcaaccatctggttatgttgagcatgccgggattggcaggaagcactacatgagagagtgtagcttaaaaaggtgcatttaatgctataattgtttatttgttttcatttgtaatatttgttttgaaatttcaaataacactgaagaagaactcaatgttttagatttccaatagaaggcacagatttaaaaggctggaagataccacttaacaagctaatcccagagcaaatacagagacaattcttaactataataaatgctttacctgtgaatagctttatcactgagagtgtatgaagataataaaatacagaacattaagttttaaacaggaaaagctcatgggtatgttcaagcttttttcaagattttttttgagacagagtcaccttgtcgctcaggctggagtgcagtggcatgatctccgctcactgcaacctctgcctcccaggttcaagcgattctcgtccctcagcctcccgagtagctgggattacaagtgtgcactaccacacccggctatttttgtatttttagtagagacagggtttcaccacgttggcccagctggtcacaaactcctgacctcaagtgatccacccacctcagcctcccaaagtgctgggattacaggcatgagacaccgcacctggccttcaagatttttttacatttctgtaatgctttgctctcaaaattcagcactctgaggaacaatgtaacctggtgaaaaaaaaaaaaaaagacatgggactcattctgcaagaagtgatctgcaactcgctatgcaaataatatgaacagaataatgctattttttaaaattaatatcccatgaaggaagactctgtatctctgcagatacacacatgaaagaggccaggaagtgaatcttccatgctaataacaatgtagttcctcctgcaggggcaggacagtccagaggaactttatttttagactattggactatttgtttaatatgatactgttaacatgtatttatatattacttgtagacagtaaatattgataaaatattttaaaaatacaataataataatcaaatgacctcataacattgttaagcctgcctggttgggcaatttgaggaatttcctcaaggtttttggacctcagtttccccatctgcaggagattagagaattcctcatggggtgctgtgggtctcccatcgctcctcaaaacaacctcagcaaccgggaaggggggaacagagaggtatgggaaggttgatgagaaaactaagtatgtgtgtgggagagggcgccgtaattcgaatccaagcagctctgctctccttttagttttttagagcattcttctacattcgaccatgtttgaataatagtggagtaaaaaaattatctatggataactccaactctacaaactgcaaaaccaaacaaaaacaacctttaagagaatcatctaaatcggcaagtagtgtgctctgagcttcaatgtacaatttacacagaagtcacaaggaagctctagcttccatctcagcctctgctttctgcccctggagggaggcagcaaagaaagtgaaggcacacccgagtgtccagccctcattcacgctggttcttctggccacagcactgggcttgtatgtggaagtctcattctgatgtatcgtgattctttgttttaaaactcaagcttagcaatttattttttaatcagttgaaactcttttcatggcaaatggtagaaagctcaataaaatttacaaaagagaaaaaaaggatggcattgtttcacataatggagaaactcgaggctttaagcattgatccttccagtgcctcaagtgacataattgtcacttcatttctcagctctgtgttctatgttccatgcagtgacaaagtggctgcctcacaggttcagttcaacctaagaggtgacgttgccttctagaaatctctgcccactcccatgaaaatcaagggatttattgattgcccaacttgagtcatcggccatggagaccccagtcaccaggagaggaagtttgtgctctgattagccaatgtggaccaaatggggggatgggggatactcaaggaaaatttagggcaccatttcttgaaaaatgtagagtaaatagtgaacgcattataataacatcccagctggccctatgattgttattacaaagcattttgaagacagaaggaaatatgagtgaccacttctgagcttcccttgtcctctgtgagtcttaagaacaggagcaaatgtcatctcgcattagcttaaatttcttaatagagtttactttttaaaaagatattttaaaacaatacactcctttttcaaaacatcattattttcaaatcatgtagacatgtatcagaactctcttaaacagactgccatagacaggctgtacagagaggcgaagctacaaaataagtctaaagtagaataaaacgagaaccaaaaagaaaatgagtgtcttatttcatgaaaagtagtaactatgcccaattcacgtaatgaaaaccgctgagcatgtcatccttaacaaaataattttattaagcaaagtccttctctatttagcacaaggaaaacattattttagtcaattaataattcccaaagtgtttccttaatattttgacagtaatttcaaatggatgtgcatgcatagaaatgattattaaactaaggcatatacacaggtacatacatactcacacccacatgattattattattattggttgaaactatagcctgaggcgacaaggaaagtaaaggtcagccttccaaacagaaaacacatgtatggtgagagcaccataaactgcagggaagaaacaaatttattctcatatttttcatcaagtttatttttagagtcatgaacaacagagacctttcttattgattaaatttcgtaatgttgaatttgatcaaatcataagacaccaattagactataatttttaaaccattatggatgataataaaggacgaatggaatcattaacaaagaattccctgagtattaaattatcccgtctttatcttgttaagaaaacttagaaattgtgtgtgggtgcgggtgtgttttcaatcacaaagagtgtttccctcttctcgtaaactcgcggaagccattttccagccctccaagggcagcatagctataggttggcagcaaatattcttcttttcggtgtgctatctagacatggcttcacacggtttgtgtttccctgttgaccttttaaagagtccataccaaggcaggacaatccctaggctgacttgaagagttcccctgatgtggagctgtcgtactcaaattcctgctggcagtttcctaagaaatgctaaaagatccttaggaatctgaattaaccagttaatagacagtgtctttctcaaactgggaatttctccactttcctcaagcctcatccgtattctagaggagagattttaagtacaggacagacttactactcattgcagaaccagaagggggagccatagtgcaaaggaatcttagaccattcacactgtttctacagggatgagtaataatcaccacatgggttacataacttccggcccacggatgaagtaagggcaatgaacgcgatattctctaaagaacatttgggtcaagatggctgtctttactttcccgtttatgtagccaagaatgaacagagaaaaatctttaccaaatttagcaattattattattattattattattattattattattattattattttgagacagtctcactctgtcgtccaagctggagtgctgtggcgtgatctcggctcactgcaagctccgcctcccagattcacgccattctcctgcctcagcctcccgagtagctgggactacgggcacctgccaccacgcccggctaatttttttttgtatttttagtggagactgggtttcaccgtgttagccaggatggtctcgaactcctgacctcatgatccacccgcctcggcctcccaaagtgctgggattacaggcatgagccaccgcgcctggcccaaacttagaagttattgagggttgccatcaatatggcggaaattgtaaggcacgtttacaacacgaagcgaagagaagggattcgctaatgggcttcactgcttgaaggaaatgcctggctgaggcataagttgaaggtcctcgggaagaactccatgttatctggaaacgactcctgagcttggacagatttgtcccagggaaagaagagccttgatcgtacctttggcaaaagctcaaagtgcaagagatcatcccgggtagagaagccaggtgtggcactcattcttgacctacacctggcagggatggaaccagtattgcaggaggtgctggtccagctgacttctcactctacagcaaacccaggagtgtaacctgcagcagaaggcagtgcccccacttgctgttttctactgcttactgaaaagcagatctcaatttcagcaaagcactaccagatttttcatccttctttttcctggatctgagagatgtaaaagtattatagttagagtgattcagacggaacccattttaaacacactctgtaagggtaagtaaacagagaaaaagataaacacagacaaagaaaagattctgccgaagaagggaaacgacccgagaaacccagcaaataaagactgtgaagtgaaattcctaacatgagatagaataaagtatcagaaaaactgtaattgatatttttgaccaagtctgagaggatgtggcatctgtggagctagagtcgacagttatgaaaagatacagatctgaagtcagaattttgttttattttaatcaacttttgttttaaactcagggggtacatgtgcaggctttttacctaaggatattgcatgatgctgaggtttggggtaccaatgatactgctacctaagtactgaggatagtacccagtagttttcaacccttgccccaatacccagtattccccagtgtgtagggttgccatcttttttttttttttgagacagtgtctcactctgtcgccaggctggagtgcagtgatgcgatcttggctcactgcaacctcagcctcccagattcaagtgattcttctgcctcagcctcccgagtagctgagactacaggtgcacgccaccacgctcagacaatttttgtatttttagtagaaacagggtttcaccatgttggccaggatggtctcgatctcttgacctcgtgatccacccaccttggcctcccaaagtgctgggattacaggcgtgagccactgcacctggccatgttgccgtctttatgtccaatgtttagttctcacttataagtaagaacatgcagcatttggttttctcttcttgggttaatttgcttacaataagcctaagcctccatggatggcctccagccacatccatgttgctgcagaggacatgatttcattatttttgcagatgcatagtattccatgatgtatatagcatattttctttatccaattcactgttaatgagcacctaggttgattccatgtctttgctattttgaatagtgctgtgataaacatgtgagtgcatgtgtctctctggttagaatgatttgctttctttcgggtatatacccagtaattctgggtcaaattgtagttcggttttaagttctttgagaaattgccaaactgctttccacagtggctggactaatttacattctcaccaacagtgcataagcattcccttttctctacagccttgctaagctggttgtattttaaaatgtcatgaaagaagtgaactggacataggctgtgcagaacattgaatcagtcaagtagaaggaagtttaagaaattctcctagagctcagagagaaagcaagctgatatttaatgaatattaggaattccaaaagtaaaaaagaaagccaattaggaagaagaaataatcaaaataatagtggaagataatgttgctaaaattactaaggattatgatcttgttttaaaaggcttagcaagtaccaggaacaacttattttaaagagtcacttgaatgaaaattatcaagtacatttatattacaggcactgagaaaagccaaaaaaatgtattaggtgaaatgaacatggtacctattccaactgagttgaatataccttagaagacaagcaaatcacaatcggtagcatagagtatgggaagtgctatcacagaagtgaaaagcttagcagaggtgcactttaattggcttgggggatcaggaaaatatcactttccagaagaagtgatatttgggcagacctgaggaatatgtcagcattatctagatgaagaaaaatgtcttcggtgagatgggaagtaatccagacagaagtaaaagcctgggtaaagtctcaaacctgaaaaagaacatgtcacatttaaacaactaagaacatttctgtaaggttgaaaaatcaaagaaaagctgagttaatgaggttgaaggaaaaacagaggctaacgtataaaaaatttcatccactatatgagtcactttaatcataatcctgagatgaagatatggacaatgcaacacaaggacaaggagtttttataatgatcatatgtatattttcaaaaaggctctctagtgagtgtggacaatgaatagtagaagagccagacaaatggtgagagactgattagaggtcatcacaggaatttggggaggaaaaggcaatgtaaactaggagattagccatgggaatggataaaaataggtagatatgagaaatttttcaaaatgtagaatcaaccttaattagatgtgggcattagggagaagtatgacagccagatatctggtttggagcaattaaatgccattctctgagatgggaatctcaggagaaagactggatgatgacttctgctttgaacatgttgaatttaatgtgatgaataggcagttggaactggggaagcagaaactagggtgaagacagggccttgtgagagcttagtgtatatatggcaaatgtttccatgggagaggagatctttgcctaagaaagtatggagagtgggaagagaataatactaagaacagaagagaaatccactaagaggatgccgatgatacctgcaactagaggcatggggaaggctttgcagttcttcttcagcagtaagggggtcataacctggagatgaggcattcggaggctaccaggatgtaattgaaaggctgagcctatgaatagcatgtggaaaatcttggccctttgagtatctggaaaagctgcagggaagggttttctaacggaggaatgaggtttcaaacatggcatgaatatgaagtgattagaggaagtagaagagtttttcattgaaggggagttcaatggttagagtagatatgccttggaagaagggaagagatttgagaaaatgtacaagaactatatggaggagagaagataaatgaatggcagagggttgtgtcctgtgcattggaaatggacaacagaggtatgaggcatgatgaagtatgacaagaaccacactgagttatattctaaatatggttttaaaatttcatgtttagtggaaaaaatacattaagcatctgagaggaaggaaaacaactacctaaatgataactgaaagcagattgtcaccagaatgtgtctcctaatatcagataaccatggagcaacacccaaggaattttgagaagaaaggattgtgcgacgtaattttatacccagctgttgtttatgtgagagggtgctaaaattcttggatatgcaaggatgcatacacagctagcatgtgtatggatacaatacagtaaccaacatatacatcatggaaatttactcaagaaactctagtaaattaagaaattaatcagtttaggaaccttatctccatatcatgagggtggacaaagcacacatatacctctccattttctctccagatcccaggaaaatgactaatcaagtataagaatgagattaaatccttagcagtcctgaaaaacaaaaacagaggaggttttatcagcagatcaaacattttaaggaattttggaaaactataaagtacattggtttgacagggaaaatagcgccaaggaaatcacaaacaaataaggacatctggaatgggtcactgaagaagcaagtaccagccttccccacagagccctggaaaaactccaagatcatcatcagcaagggctggaaatatttgttgaatgatgttgaatgaatgagcagcctgtgtggcaattagcaacataattaattgaaggaatgccagcccagctgggctggtcctcagctctggtacacagagagctggctatggtattttctcttaagatataatagataagatgaactctatataaagtggtggctcttcctttaggaaaaagaaaaataatagaaaagcagctttgtagaggaatgaaatgtcctgaaactccctactcccagagaaatgtcttccctggcttacttggatttattgaggcaaatccttaacctacttacatgctgtttgtttgttcaacctggaaagaaatccatttgcatcgcacccacccacccaaagaggactggagtatgctcccattcaggagagagctctgctgtagggatggtacactctacaattgctgaagaaagccagttgaatgatcaacagggaccactgtaatccttgaatcataattacaaatacacagactttgaggaaaagtaaaccattaattagaaacatctataggaacaggtggaacagatggtccttgagagattaataatggcaatagaagttaatttaacatttccattaaaattattaaaaacatttgacagaatattgaatatgtgaaaaaggacatacttctttgaaaatgaatcaaatgaataagaaattttgagaaattaaaatcgtgcataatgggggagaaaaaaactaagaagggctgattactgcaatagacaaagctaaaattagtgactaaatctcctagaatatggaatagtaacaaagattaagaatattactgttgtttgttattaacatcttcctctcaaaacatattagattttctattttggggattcagcagtttatctatgagtataaattgtatcatgttacataaccatagtttatcatttgttgaacatacgcaatttcttttagaatactgtgatcttcttttcctcttctaacaactcccttttctccttgtgaaacttctaattcatgtttcttgaactactgaatacatttgtcatgtgtcttaaattttctatgaaaatagcactgtcccacttttattttaaaatatttaaggatgttcatgtgtttcgaagacaaaattaaagattttaattaattgtattttctgttggtttatctgaatttttgaaaacatcaatattacaacattttaagtaaaaatgaacatattatttataaaagtgcatgtttgagtttaattctctaccgtttttactgttctttactcttttccttttgcagggagagcgttggctattttattgtagatacataggcacacactccagagagccagatgtagatacaagatttgttatgtaaattatctgtccccttcaagtccatttatcccttttccccaaaaccactgtcaactctttcagttgatccctgtggtatttccctgcttgtggctaaataatgcattagtcttgctgcttcctgatttttcagctttacatattatttattgacttcccactatgtcagatgaggatttaattttgttttttgcatccctttgcatctccaaagaaactctccattatctccccttcagtctttcaatgtaattatactgtaattttagtttccccaaatattcattgcttaaactattataatcatgtaaatgctattgagtcctgagcctagtaaactctgataacttttcctttcctgcacaactttttacatctcctggaatcaatccttatctttttgttcatttgtttatgtggttttctgtatacttatcagaaatttaacctacactctccagcaattacctgaatctcttttcaataagttcattcacattaggtattttaatgctttcatcttcttgaaaaaatttctctgtgacccttctgacctgtcaatattgagaatggttgtcctctgcaagggttatgctagcttctctgactttcatcaccaatctgggatttttctttatttctctctcgtattgggtgccttttttcttggatctcatgtcttcttcttttagggttccttcggaggaatacaaaagaagtaacattttaaaaaccttgagtttctgaaacttctttttacctgacaccagatagtttagctgggcacatagttttaagaataggaataggaaaatattgcttatttctcttctagtttgcaatatttgctattgagcaatctgaagtcactgagattcctaatctgttgtataaaacttgttttcatttttttttcttctctgagaacctgtagaatttcctttttatcttcagtcttctgaaactgcaaaagcaagagctcttcaagtaaagagccttaacatttgcctcttttcattcactctcttggacacccagatgatgggtcctttgaatctggaaactcatgtcctcagttctgtcaaatattcttgaattattttgttgataattacttccactttatttcatctgtttgttctttcttgaattgccattagataattattggagctcttaaactgatttccccaattccttactatttttcaatttccaatcactttgtccctttagactgttttctggaagattatctcaactttttcttcctatttttctgtttacttttcaattttactttcaatttcccagaactcttacttctgaatatttatttgtatggcatttttaatgattgtaacttactatcttacctatctgagaacgtaatgatagttttttatttattttttcccacatagtctctgttttctccaagttgcttttgtccaagttgctttttggtttggtctctatatttcatcccaggctttctttacatgtttgatattctttttttgtctgctcagatttagtgggcaaactagaagctgattggaagcactgacgtcccagcgtgtcttattaaaaaactccaatgtctgtcggccaggcacggtggctcaccctgtaatccagcactttgggaggccgaggtgggtggattacaaggtcaggagattgagaccagcctggccaatgtggtgaaaccctgtctctactaaaaatacaaaaattagctgggtgtggtggtgcgcacctgtagtcccagctactcaggaaactgaggcaggaaaatcgcttgaacctgggaggcgaattgcagtgagccgagattgcaccactgtactccagcctgatgacagagtgagactccatctcaaaaaataccaaaaaactccaatgtctttcctcttgtactgggcaggccctttagcttgaactcttccaaggaagatgagtgaggaaaaaggttgggggctctatttgtccattttcacgctgctatgaagacatacacgagactgggatatttataaagaaaagaggtttaattgactcacagttccacatggctggggaggcctcaggaaacttagaatcatggcagaagtggaagaggctcatcttatatggtggcaggcaggcaagagagagcgagcaaaaacagggaaaactgccttataaaactatcagatcctgtgagaactcactcactatcacgagaacagcatggaggaaaacactttcatgatcaagtcaccttacacctggtccctccctcgacatgtggggattatggggattacaatttgagatgagatttcggtggcgacccagagccaaaccatatcaggggcatctcagaattttttgtagagatgctcatttaacccatctccctaaagttcaaaagttttactcataatccattccctagagacgctctggtttactgtcttcagaacataaccctccaatcttttgccggggaagggaattggcccagacattaatagaaactaatttctaaaatgcgctttctttttaagacagggtctcacgctgttgcccaggctggagtgaagtggcacgatcacaacttactacagcctccacctcccaggctcaagtggtcctcctacctcagcctctcaagtagttgagaccacaggtgtgtgccaccatgcctggctaatttttatgtagagacagggtttcaccaggttgctcaggctggtctgaacccctgggctttagtgatctgcctgcctcagcctcccaaagtgctgggattgcaggcgtgagccatcacactgggcctctaaatgcttttaaccaagtcttgttattttagcctcctactctctctttttctccacttctgggggtagctggtttgcacacttgctgagacttttgagggttctgtggcataatctcagcttctacttctggcttagattcagccttcttaaataacaagccctctgttatttatttatttgttattgagattccaaaattctgttgctgttgtcccctctgctgtatccttgtgggtatatgtcttacaaaatctcccttatttgccttttaatggagttttaggagggatgggaagtacatacatatgtttaatctgttatctttacctggaaattgattttcaagtatatttgctaattgaaatagttatgcaatgttacacttgataatatctgaccttctaaataaagttttaaacatctgtattaattgatgtaggctaataagagtgctacagcaagagcaaccctcgaacttcagagtttaacacgacaatagtttaattctcattattgctagatgttcattatgggtagagggtggctctgtttcactatgcctggagattgatagaggtggacaaagactcaattattttgcagttgtacaatctgaagtgtataacgttcttggttcacatagtaaggacagagagcttgagggtcttacattagccaataaatattttagcctgaaagtgatatgctcacatttcattggccagaatgtttcatgggcctgatttactgaaagaaacaggaaagtataatccccactggtgtttgaaagaaagatatgttaagtgggcactagaagtctccagcctgtcactttcagatacacagccatgcaccgcataatgaccttttagttaacaacagaccaaatgtatgatggcggtcccataagattacaatattgtattttcactgtgccttttctatgtttagacacacaaatacttaccattgtgctacaagtgcctctactattcagtacagtaacacactgtccaggtttctagcttatgacaataggttagaccattgtgcacagcctagtaccagtaggctatgcacaatgaagaaattgcctcaggatacatttctcagaacatatccttgttgttaagcaacacatgaatatacattgagctgagagaatgtatttgctagggtaagactagactgctataaaaagtagacccaactcaatgcagtggcttaaaaggaaatgcggtttattcattttcactgaaacacaccaaagggagcatccaatgctgacaggtggccatggtcccaaccagatgcttcgactgtgttcatgcattttactcttacagctctgttctaagcaaataacttgtatgctgatgttcacttgaaaagcctaggacacacgcataatgaaagggtaaagacagaatctttttttcttttttttttttttttttttgagacggagtctcgctctgtcgcccaggctggagtgcagtggcgcgatctcggctcactgcaagctccgcctcccgggttcacgccattctcctgcctcagcctcccaagtagctgggactacaggcgcccgccactacgcccggctaattttttgtatttttagtagagacggggtttcaccgttttagccgggatggtctcgatctcctgacctcgtgatccgcccgcctcggcctcccaaagtgctgggattacaggcgtgagccaccgcgcccggccaagggtaaagacagaatctttacatgaacaacttagtgttgaaaatcctaacactaagtgccaagcatttcttcttacatatccctatttgtctttcagtttttcgtgggagatgcgccattatgtttgaaaatacaagaggtgtttatggagaaagatggaagctgcttatgagacacaagacaggccctgtggaagtttagtcatgaagaagataaagaagattttctggagggatcctctagaaacaaacaacaaaacccacaaattataatgcatctgcacttagactgctaggaactttgactcgatggagtgaaagcttaaggctttgttctttacctgtgctgctttcaaaaaatgtggacagtgggtccatttttgcaagcagaagttgtttaaccatgagatgaatgtcccatgatttcaaatgatatataataaacacttttcttttgtgtttccaatctattttctttcaacacttattaccttagtggattagtctattttcacactgctataaagaatacctgagactgggtaatttataaggaagagaggtttaattgacttacagttctgcatggctggggaggcctcaggaaacttataatcatggtagaaggaaaaacaagcacattttacgcggcagcaggtgagagggagagtgaatgagtatgaaggaggaacggtcaaacacttataaaaccatcagatctcatgagaactcactatcatgagaacagcatggagggaaccgcccacccccatgatccaatcacctccctccctcgacatgtgggaattacaggtccctcccttgacatatggggattgcaatttgagatgagatttgggtggagacacagagccaaatcacatcctttggatgaaagtgataatcaaacttttaaatgtatacagttgaaagataaagtcttaaaatacttgaattcagaataattctgaaattctgaaatacttgaattcagaataattctgaaattctgaaattctggaaaggaaaataatggagaattgaagtatttctacgctgtcaagcagattcccctgttcccacttgctccttagtgtcccctgggaatctccaaatctccagctttgacctgattctaatccctgattaattataaaaggcaccaggaagtggggaaacacacacttttaaatataatcttagataataagattataaataagttcagaaatgttataataggagaaagtgtgagtttcagaatagaaagcactatattaagtggatgattatggccactattgggaggtaattatcaattgattaaaggcaggtcagctagagacagtttggcgtaatgtatacagaagtgcttctggatcagctagagctaaagatccaaggagatcctttccctgggaaggcagagaatggctgtgggagtgaaagaagaatcgtttctgcagaatctgaaggtgaactcggagccttagaaaatggatcttcaagtgtagcccagactgagagaagaaaatagcaactggatgaactagatagatggtctcctcagccacagaagcttaattttgatcagaagttaaaacatcatggtatgaaaaagaaatcccacatttttctaggagctaaagcctggggtcttttttttttttttgagatggagttttgctcttgtcacccaggctggagtacaatggcatgatctcagctcactgcaacctctgccttccagatttaagtgattctcctgcctcagcctccctagtagttgggactacaggcaagcgccaccatgccgggctaatttttgtatttttagtagagacggggtttcaccatgttggccaggctggtctcgaaccacccactcaagtggagacccactttggcctcccaaagtgtggggattacaggcatgagccactgtcttacaggcatgagccactgtccctggcctaagactgggctctttagagagttcacaattgctcataattctcaatttttgatctttataacagactgtatgataaacatggttactttcactgttgaaaacaaaaataacttcagaaataaagacaggacagcaagtcacctgtccagagtgattattgggcttagatgtctgtgtctacccaggtcaaaatggaaaagttgacacaaatggcacttttacttaccctacatggtgtcttccctgtcttctggcagtgtcccctcccacccaggcactcagtctacctcagcgattatcacacctcccaaagtgaatcttatgcaaggcatgaactcatgtgcttattgatagaacatttcccagagtataagggagtttcaaaagaaaatagtcttcagaaaaagaaatggaggctttcacatagcaagatggatttttggcctaggttgaatggtgtgttcaccaaaagtgtggaataaagaaggaatcagatactgagggactcacaggcagataccaagagtgacctacatcaaacatttgatgaccaatcctgaactatacatcatttcatttaacccttcccaaaaaaagcccactaaggtaggtgtgttgctgtctctatttcatagatgaggggaaatctatggtgtagggaccttaatgtcattttcaatgtcttccagaggttaagtggctcagatctgctttgaacaaaatatcacctgtcaacagagcccatgttcttctttctccacaagaaacctggggtcagaacaatggacagaggccagcccagcctccttgtgacaagcaccattccccagtatcaaaggattgcctggggaggctgagggattcctcgatattctgaagccttacatgtcaaccgaatccaacaattactgatgatttttattaattacatttatttctaaaaatattaaagacaagtgggttttcctgctgacaagagttgatattttgcaggcaggaaattttgcattatccaaatattggctattttgcatggcctcattctacatatcctctccaccctgcttcctgtccccacccaacacttcccaaatcaacggccaaactttggcagaggcatgcagagctggagcagtcagtgtaaactgttctgggaagccagactctgcaactgttctcggcataggcacttgtctgtgtaatggaagctcccccgagaaggacccttgttctttggaaaatagtgtctgctcttagcaatagcagtgaatctagagtggattgctggtcacttgatgtgacaggggtaggaactgtagggaaatgaataagcttcttgaagatgtaaccctacaaaaaagcccaattttcttaggagaaaccgttgtcttgccagcttccttcctctgcttgagctaaatatataggtagggaggtcagcctttgttcctctagcatgttgctaagtcctatacaagacacatccaaagacttactgaaaaaaacatatgtgaaatatttgtgtttgttttaccataaagccaattaatatctcatctatgacagcattttggactctgtaaggcactgctcaacagtgaggtacaatattttttctttcaaagtacctgaacccatgattgtgttcaatcatctgtccatcctaaattgagatccttcctttcttattctagttgggtaaagtattgacaaagctaacattagaattttaacaaaccaagctaattgcctatgtatcagcccctgctctgaagagtgatgatcacagaagtgacttttttttttttttagatgaagtctcactcttgttccccaggctggagtgcaatgcatgatctcgggtcactggaacctccccctcccgggttcaagcaattctccttcctcagcttctggattagctggaattacaggcgcctgctaccacgcccagctaatttttgtatttttagtagagatggggtttcaccatgttggccaggctggtcttgaactcctgacctcaggtaatctgcctgccttggcctcccaaagtgctggaattacaggcgtgagccagaaagtgacccttcagttagggctgaggaatcttttggattcttgaaactgagggatgaggtgggaaagcatcccctgatgtctgggactaacctgatgttgacagatagaccttgatatgattgcaagccagtctgatgctcatagctaggtcattttgttctcctgtctcctataatcatgaaataccaacttcagacaaggttactgtgaaatcataataacataaaacaaaacaagtccactttataattttgtcttggcatagatgaacaaggtcactgtgacattagcaaaacacacaaatcatacgatttccctcctttctgacagcatccaagctagaaacaatacccagttctttagatccttctccaaataacttgaccaaagctcaaatcctataataggttctttctaatattctcttgctgagataacccacagttttctcttgcgtatgttttctgtctcatgcaatgagaactcagctttttaaaaaaaactcagctttttaaagcctagatgtattcttgtaggactttggctgtagggcattgataatctcatagtaaacactcagcttcaccactgctaaaccagagtgattcagagtttccctcttattatcctccctcaccccatgcaatgcctatgatgttcatgtgtataaaggctgtaagggtggagcatacaattttccttgcactcttaaggacaacagtgtttctgcatctctgaggtcaatttaaagcctcttatatctaggcaggtggtcaaggcccctgcttaacactatggagcccagagtcttttccgtctcctttaggggatctcctgtggtgggccttgagaatggccttcattctagaaggcatatatatacttccctcttatctccacaatgagagacagtagccttgtgtagggattctcacagagatggtgagtggaataatggcaagtacacactatgcggcctcttcatacacacagaaatgtttgcagttgggcttagggtcaggaagtcaaatgactgcaggggcaagtcttgtttgtgagtgaatgaggtgggccaggtctgatacaaaacaaggtcatggggtctttggtaaactggcaaaagcatgtcctctctaaaaaggcacaacttaatttcttaatttaactactgctggtggctgctatgaggcaaggagattccagcgtggccagatcgtttgattccttctttctttcattccttccttccgtccttccttccttccttctgtccttccttccgtccgtccgtccttccttccttcttccctccgtccctctttctctctctttctgtcttctctctctctcccctttcttttttctttctttctttctttttttttttttgtgagacaaagtctcactctgtcacccaggctggagtgcaatggcatgatcttggctcactgtaacctctgcctcccaggttcaagcgattctcctgtctcagcctcctgagtagctgggtttacaggtgtgcaccaccacacccggctcatttttgtatttttagtagagacagggtttcaatgtgttaaccaggatggtttcaatctcctgaccttgtgatccacccgccttgacctcccaaagtgctgggattacaggcatgagccactgcaaccggcctctctctccccttttttctttttctttttggggtgaatagagtttcactttgtttcccaggcttcataattacatgagcccattcttataacaaatctcagcttatatatttatatacatcccattggttctgtttttctggagaacttctactaatacactttgcaaatcctttccctagggcttgttattgtgactattgttattgcttgcttgtttaataaattttctggagtaattctgtataatctatatgctttatcatgcatcaccactgaggtattgcttggttagctcagtggtcagctaatgattgaacagagatttactgaaacacctgtaaccaataaatctccctgtgtttgttgttgggtcttctgtgcgtattggggtgtggtttacaactctgtcttagctttcacttcccacttgtgcagagcctcaaggtcagccagagatgaaactttaaggccttctcagttctttcctgagcatgttcacagtcctaggtatgtatataatcctatgtacgcatgcagccttcccaactcctagcaacatgacggagtttttcgaagtcccctctagacattttattccctggatttttcttttaagcttttctgtgccccaagtggtactgctgcctctggcagtcatgacgttaaaaaattatctctgattattttcaacaaatgtctccaggcaaaaggctgttcacactgggatagctctaagtcaagtcaaataaagacagtccttttcaaacggggtcttctggaaaaccagcaggctggagatggttcttttaaggagtttctaccctgatttgcactttctagtggctgccaggctgttggttttcattgtgactggagactagtggctactgcaaacatggggagaaggtatggaaataggaatagctacaactccacaaagcttgctgttcttatcaagattcagccattttttttttcttgaataaatactccctggattactggaagtctttggttaatttccaatgttgtgaaacagttgattctgacagctttgcaagtgttcttctggctttcatggaaaagagaatttttggaagtccttagtctaccatttttactgatattttaaattaaggtttgaaaattttaaaatcattaattgcagtcctaaaactacctaatgtgaaaattaatcatagttccaaaaggtattagataaacaacacagtcataaaatctttctaagcaacttaacaagatttgctttcaaagtaataaatgtagacactgcccggttaagacgagcaaccctgtcttctaccctctgatttgagttttcagtgatacctaagcatcgttaagtgcttctgatttgttgattattatctatgcctaggaagtctacatgctgttatttatcccagagaaatacttacatttaccttaaagggctgagcccggccgaggtgggcagaacatgaggtcagcagttcgagaccagcctggccaatatgttgaaagcccatctctactaaaaatacaaaaattagccaggcatggtggcaggtgcctgcagtctcagctacttgggaggctgaggcaggagaatcacttgaacccagaaggcgtaagttgcaatgagccgagatcgtgccactgcactccaacttgggcagcagagcaagactccgtctcaaaaaaaaaagaaaaaaaagagatgagcccaaggatttacagagtagaaaccactggtaacaagttgaatttctatttatatgaggatagttaaataatttatgaatttatgcaacagaatattatgtggctaatgaacgacttaatggagctttggggcttgacatgcaaaaatatttatgacataactttaggttaaaaaggtaaagaattgtacatatagtcttttgatgctaactgtgtttaaaaaccaataagataaaacattatttctacatgtacatttgagtttgtaactatctgtaaaaacatcttgaaatgtgtgcataaagttaatattagtggttatttctagggacaattgtggaactgaggccaggtctgggttgaagtaggggaggaaaaatgcaggaaaaggaatagcaactttgtctgagattttaaacatcaaatataggtgtaattaacatgagttaaatctaatatgggtataacaaaaataaaaatattacatgtaaacatattttaaatatacagtaaaagtcaaatagtaattacccctatggctttcagagatcaaaggtaaacttaattttcttctatgtacttttctatttttccatagttttctataataaacatataataaacattggaataagaaacatgtaaaaattgatacaagtgggtataaataacagtaaacaagaaatttccagaaattgttgtaaaatattgcttaataggacaaacattataatgttcattcagaattaaacactagttcctcttctatcttgcagaacatgtataatactttgagaaacctatttgtataaaactaacccctccccccataaaactatttgattagtaaaataatgtcaaaaatttttttgctggtctttgtttttgaatgggacttctacatattatgactgagagttacttagaaattcacagaaggttctccttgaaaattaattatacctctatccctaggacatattaaaatccaaccatgggactggtataaaataatatatactttaactgaatatatgtggttaaatcccataagatgaacagaggtttactcaacttttccatcagaagttaagtcctttgaagttatagattgaaatacattttatatacacgtgagagatgtgactcaagaaagttcactaattttttataaatttctgaaaccattgcccaacccccaaaagcaatctcttataggtttgtattttgttctttctttcaagaagctgatattctttttacaaaaatcactgtaatcacaggactggcatcaaagagtttctaaagatatcttgaaatacagcaatctaattacagagtctattctctaatccctactgatgtgccctggttattatatcctccacaactttgctgaaagatgacagcaccatctctccttaccctagaagaacatcgagttgatttaaatgttttgggtaccctaatgctgctcatctcctcctctcctccaaacaaatgggtgtgaactaatgtcaattcccttcctggggtggtaggaaagaaaatgtgaccccagtgaaaaatgtattgcaaatgtcaaaataaatttcagctaaaaatgacatttttttcaaggagatgtaatgagaaaactgttcaaaaggtagagttaaagtttcctggttccgtatttaattaactcaatctgacttttattatgctttgtattatgtgtttccttgttcagtaaacaaacagcagaaaattaaactcgggcaactgccaactagcagtaaatttcattgaaaaataatgaattgccatgggatgccatagggtcttgggcagataaacttatttttcctggaaagtttccacttgcatttgtcacaatttgatatataaaaggaacaaaagaaatgaaatatagtagttggtggtaggtgtataaaagtgtaatggccttggagaataattcagcggctggtttctgggattttcaacagattagtcctgtttcctcttgaggaacatggttggatgccagggaaattctcaccctgcttttatggatctgcagaagctgcagaaactgcgctctattaactttcagccaaaggggagctcactgcacaaggatgaccctgaagataaggagtgtacataatttagggaaaagagagacttcaaatgaaaaaaggctactcctaaataactctatgctatgtgactaataactgcttaagtccttcaaacttaataggaatcaaagatatttccaaacattcaactatttggttttcctacttgatatcttttcctgatgtataggtactcttctaatgatcccctgcttgagtttatgtccaggcaagaaagggtttggattaaatcaggaaaatataaggtctttttgagtgatatgaaaatgattacatcagattttctatctcatggtgtaaaggccaggtgtctgtttatctgattgtagagcgtatctcccaggttcaagtactcatggtggaagacaattctggttttatccccaccaacttcccctggcaggagtagaaccactgggttccacagaagcgtaatcattccagctgctgagtaggatgttagttagttattctcccagatttcaagcaataattcccatgaatggaccatgattcttttcagcgtctcttggaaggctgtttggcaggaaagcacccactatttggtgttagatattagttgagtctatacttattccttaatggttaaatagactttgaagagtcattcaataaatagttttagccgggctcggtggctcacacctgtaatcccagcactttgggaggccgaggcggctggatcatgaggtcaggagtttgagatcagcctagccaacgtggtaaaaccccatctctactaaaaatacaaaaattagctgggtgtcgtggcgtgcacctgtaatcccagctactccagaggctgaggcaggagaattgcttaaaccggggaagttttaatgaggctgcagtgagccgagatcgcgccactgcactccagcttgggtgacagaacaagactctgcctcggaaaaaaaaaaaagtttctaagcaccaattatgtacccaaccctattgtacgtactggggccacatcagggagctaaaattggaaaaaaaaaaaaaaaaaatccctgacttcagggaatttacttcttcttggggaaagacagacaagtgagtgaaaatagtatttcataaagtgataattactaaagagagatatatggagtttgagaaatcagctagttgctatggtagaccttcctgagaaggtagcatttgagaaaagacttgaagaaaggaagggcatggcttgagtgtatcttagggcagagcattcaggcagaggaagcagctggcctcacctttgcaaggttctgggcaggagcacgcctggagcttccaggaagagcacagaggcctgtgtggcagaactggagtgaaggaggaaggaggtaatctggaagtgtaacagtggcaggccctctgcagccactgtaaggatccataactctaagcaagatgccaggctactagggggccttgaaaagaggtgacaagatgttattctggcttctgtgtggggaatagactataggaggtacaggggaaggcaggcaaagcagttaggccctgctgcaggcatgtaggggagcgatggcgccttggttcactgtgtttattgggagacatgaagagcttggaatcacctaaacttttcagccaagttcataatctagacaaggaagagataaaacctgttgcctttggttatcttgaactttgaaatactatatggaaagtgcttgccacataatatggggatcaataaatgtctgttcttttccattccaaaacttctcacctaaaaagttaagcagggaaaaaaaaaaaggctttgaatctataatttgtaatttatgtacagattttttaaaacacacacaaagaacaatactgatgtccatagagagtgaacaaacacgtatatgtaacaaaattgtatatttttaaacagtactattgcttataaaccaaattcaggatagttgttgcacgaggaaggggtaaaaggaaagggacagtgttcaaaaaccaactctctctcttccttccttccttctttctttgattttttaaaaagtcactaaaagaaaagtatcaaccgttgttaagtttgaatggtattaacatgtctttattatattaatctttgttttaaaataacatatgaagtttgaattttaaacttagtttaaaattaaaattgaaaaaatagacagtaaggacgaaagaagaataaagggaaggcaggaggcagggaaaagagagagggtcagaagagagaatcaatcggattcatcgtcatctgctttaagtagactttatggtagtctgaaatatggctatttaaatatttatcaaaaactagatgttaattgaaaattatgtgcataattagtaacagttttaactgatattgaaatagcactttataaattgtaaaatgctttagtgtaacttaaggcattcagttctcaaagcaaccttagaagataatgtggccatgatgaaatctctgtttttggagatgaagaaattaacatccagagttgctaaatggtctcctggaatgccgcagagccgggcctagaacccaagctttcgggtctgaggattcacatagcttgctctcttctcaagacttcatcaatgtagtaactgtaatttacagcttaatagtaaatgtaatagtgattttgttctttttacttcatgagaatcttagggattctattctcactgtaaaaattcaatagcaaaggaaagctaagtacccccttggttctccagcgtctcctcccaagccctgtgacctaattcagttccactcacctgggaggtaaatgcccttagcatttgggtgtgctccttatagacacattccagaacagtttcatcatacaattgcacctatggagaccgaattttatcttattttttaacataacataacatatcttattttttacataaggatgaaattatatctcactctgtaacagctatgacttgatcgcctttcaatggctaaaccaatggtaataccacgtaagaatcagttgtcttacatccttgccagtacttgctatgaatggtctcttttattttaccagtttgagaggggaaaaacccaatgctattttaaatcgtatcccctgaattgcaagggaaattgagcatctttttatttgtaacattggccacttgaatttcttccaggtcttttgctaatttattataggatttctatattttttgttgctaattctttatgtttcaatgtgtttcaaatattttttcagtctttgtttgtgttttaacatctttatggtatcttttctcatataagtgaattttacatgtttacttagccagactttccgtttgtacattctttttgggtcatgttttaggctattactttccagaaataataaacactttttacttttatatggttttgcttttatgtttagttccttaactatacttagaatttatttctgtgagaactcaaaaatctattttctaaatgagaatacagcaatttctgaacctttaatgaaaaatctatactttcctcaaggatctaaaatgtcacctttattatgtaccaaattctcaaataaactgaatctatcatgaactccctatgtgctagaattgacaacacatttagactgacacattttagaattcatttgttaagttatgtaagactcctgtgcatttaaaaactcaagtaattcagattacagagctaacacttcaattcctctttcacttctatccacctgccccaattctaggctcctctctagcaataaccactactattggttattagtattggtgtttgtttcttcagacctttgtcagtcttaaatttaagaacattaacagtatatgaatagatcctcttttcaaaaaaatgaaaatattaagagaagaccccatgtgcctttaataatcattttcaacaccaatatccttttttatgggcaactactatgaataatttaggatatttccttccagactttttcacatgcatttacattttataggcaaaccaaaaaaaaaaaaaaaaaaaaagacaaaccacgtacgtccgaggtttaggtggcacacagtggtatgggttttatccgttattaaaatgttgatatacttctatactgttttatagagagcttctgcctctggctttccgaatatcccccccatatgctgcgccacccacacctttctcagtgccccacttctcagcccctgcaaattcctcatgagacagcagccgattatgaggaaacctcaatgcctcaaacaatagcccccccacccccaacccctgcactacagctggcatctattttagtcttttggttttcctacatattggctgttaaacatgttgaatatcattcatgactacatagaacatgtagtagatctctaagatttactaaattggtgcagaagtaattgcggttttgggccattatttaaatgaccaaaaccacaattacttttgcaccaacctaatataattgagtgttaaaaaatcaagtcagagaatgtggtaggcagaataattttcccctttaaaggtttgtcctaatctctggaacttgtgaatatgttatgttctataacaagggggattaaggctgcagatagaagttgctagtcagttgactttgagatggggagataatcctggatcatccagtgagactgagccaatgacaatagtccaaaaaagtgaacgagagaggttggagtgtcagagtcagagggagatttgaagttctgaagatgttacatttctggatttaaagatggaatgaggccacaagccatggaagccacaagccatggaggccacaagccaggtgtctctagaggctggagaaaggcaaggaaatggattcttttgtagagcttccagggaggaaggcagccctgccaataccttgatttgaggccactgagactcatttaagacttttttccttatgttcagagggtacatgtgcaggtctgtgacatgggtatagtgcataatactgaggtttgggcttctagtgaacccattgctaaatagtgagcacagtgcaaaataggtagtttttcaacccttacccctctttttatctccctgcttttggagtcctcagtgtctattatttttatgtttgtttccacgtgtacccgtttgtttagcttacactacaagttagaacatgtggtatttgattttctgtttcttagttattttacttaggacaatggcctccagtttcaatcatgttactatgaagtacatgatctcattcttttttatggctgcatagtattccatggtgtatatgtaccatattttctttacccatcagtggatggacacttacaatgattccatgactttgctgttgtgaatggtgctgcaataaacatacaaaggctggtgtatttttgataaaacaatttcttttcctttggatggatacccagtagtgagattgctgggttaaatggtagttctacttttagttctttgagaaatctccatactgtttttcacaggggttgaactaatttaactccaccaatagtacatacacattcccttttctcttcatcctcaccaacatcaacatctgtcgttttttgacttttcaataataactattctgatttgggtgagatggtgtctcattgtgattttaatttgcatttctctgatgattaatgatgatgagcacttttcatatgtttgttggctgcttgtgtgttctcttttgagaagtgtctgttgatgtcctttgcccactttttaattgggttatttgtattttttcttgttgatattttaaagtcccttatagattctggatattagtcctttgtcggatgcatagtttgcaaagattttctcccacactgtaggtgtctgtttactctgttaatggtttcttttgctgtgcagaagctcttttgtttaattaagtcccattaatacagctgtattacaatgaactgtaataccattcatttcaaaacacctatgctatctctgatctctaaactctcagaaaactgtccctttaatgacctcttcattgtgacgtttaatgaacaatctttagctctctctgattagacctgtggcactgtagagacttcttttctagaaataccgtcctcctttagtttgtatgattctattctttctttcttagttttcctcctgcctctgtcactactagcattacctcacagccttttttttatcctttgctgcatctaagtatcagttttgttctcttggcacgccactgggaatctatatggcttcctttggcaatctcacccatgatggctgtaccgtctctgggctaatgactctcaagtgcttgtctccagataattatgaagataatcatattgtttctatcttccctctctgctatgatttatgattctgtgatctccacgaaatggaatcgtacttgaagttggttcgcagttatcaaagcccttgttctttccaagaagtcttcttgcttttcctcctggctgctcaatctgctctcttgatttactcaagcctaaaggaattaagatacactggatcctactttctgtcctgccacataggccaacagtgtgttcacatccattctaagatgagactgtaggtacaaaaagagcctgcgagagctaattcccaaacacaagtgtggaaaagacaggaagcacatcatcattatcatcatcatcatcatcatcatcatcaccatcatcatcaccaccatcatcatcatcatcaccaccatcatcatcacatcattgtcactacaacagcaaatcatacttgaaaggcatcaagttcttctgctacccagtggatggagcttttgagaagactggaccagtttgagagaataaggaaaccccattttctctggtggtctgatttgtgacataagtaattccgtgaccacaccacctgaagagtgtgcctaggagatatcagaaccggagtacagcatgaaattagcatcacacactgactacaaaacaaaaacaacaaaatttaagagccgagttttattgagaccagggtgggtgggactcagagagacaacaatctatagaggcaaacacaggagaaacatctgatataaaagagcaggaggcaacaagggaagttgtcatttagaccctcatgggctccacatttttgcaagcactgagctttataaagacctgattcttacactagccgctccaggctatatctgtactgccactgccagacataattggagtgctactgggccttatagagagaggttggatcccatgaccagtccagaaagataactctcaactaggaagaccagatttaaggccattttgaaagatcttgataagccaaagtggggagcctcgctgacttcccaagacttagcttggccaggatctgtttgcccatcaagttagaagttgaagctacagacaagacagagacagttgggggaggatgtcagaaaatgagcatggagttagagataacccatatcttctgtagtctttcaacagagacagttgctcagttctggttgatccaatgaaaggaaagttttgtctgcacatatggctgagcttcctaactggactcatatgttcagttctaagaaaaagctacatgttagtggaataagaaacaatccctactgcaggagatgcataagacttcccatcagtacccacttatcccaaacacatagacagcctggaggataaaccaaaaaacagatcctagtcagagggagacctagatttttctgtcagggattggaaagtcctcttaggcaagagtatttgcctttaaggtgccatggagactaacttggagggagaagtcagggagtaggaacagacatgattattctgaaaaatcataatgaatctcttttgcacttccaggcacaaactcttcttaactcattcttaaataactaccttaggagtggggtgtaggtgattacttctgaaagaatgtgaagaggctgggcgcagtggctcacaccagcactttggaaggcctaggcgggtggatcacctgaggtcaggagttccagaccagcctggccaacatagtgaaaccctgtctctactaaaaatacaaaaaaattagctggtcatggtggcaggcacctataatcccagctactttggaggctgaggcagaagaatcgcttgaacccgggaggcggaggttgcagtgggctgagatacgcaccgttgcactccagcctgggcaacaagagcgaaactctgtctcaaaacaaacaaacaaataaacaaacaaaacaaacaaacaaacaaaagaatgtaaagagaatgaaaacattcagcttttggtatccaaagtaggattctggaacaaatgatgagctggaaagccaagcctcttagaaaagttgctggttcactcagatcattttccctaagtgcagagatgttactccttctgcctgaggtataagatggcaactcccgcctgcctcgctagacccttcccaatcagggaaaacttagtgaatcagttgaccctattttgttgtcatgtcagcctccattctgctgttttgctgctgctgcttggtgcttgggctggaaagtggtggtttaaatgtccagcatctcacccggacgtgatatctcatgcctgtaatcccagcactttgggaggctgaggtatgtggatcatttgaggtcaggagttcaagaccagcctggccaatatggtgaaaccccgtttctactaaaaatacaaaaaatagccaagcactggtgatgcgcgcctgtagtcccagttacttgggaggctgaggcaggagaatcgcttgagcctgggaggcggaggttgcagtgagcctagatcgcgccactgcactccagcctgggtgacagagtgagactccatctcaaaaaaaaaaaaaaaaaaaaagtccaacatctcttccttctgctgggagtagccacctctttacctgcttcttttgcagcgttgacaccttatccccaccacctgcacccacccctacccctgcaccttgctctaacatgtggtcagaatggggtgactgccagcttctgcatgaactttccctctacagccacggtgattgtctaggggaaaaggcagaaaactcagctaaaccaatgagtcttttatggagatttatttaactacattgagtggcatcttttccttctctgatggtaaagctaggaatatgtaagagcaaaaatggctgaaaactttgctctagtgttgaagggaaagccatgtgacaggaaagaagaaagccactgttcagcctgaagcagagtccactgatgctcagagagagtcctagtatcattgcaacccgccattcagccatctcgaagataccaggatcccactcttcctgcaacttagctatacacatcaattcagtttccattttgcctaagctcgtgcaactttaatctctttcgcttgcagctaagagttctgcctgtgtagcggtcttataattatctgaattagagcaacactgaatgagcctactcgccctttctcaggtctaaaaataccatataaaatattcgtgagaaattaatatagttcctagaaaagactttgccaacgcttgtccatttgtaggatattttaagtagcctttaaacaacaataactcccttttggaatgaacagacaaaaggaagaactgttcttctgagatgtgagatcctgggatatgattcaacaggactttttgtgggaatggttttgctgcatttttcttttccagagggcagaaaagaaaaaccatgttattttcttttattgtatgttataaatgcatataatttccaaaaaatcaacaaagacttctgatgtaaatgtgtattagtttcatctaacttctttaaacgccatcacatacctaaggacttggggagacatatctattttcacagttctttccgattctaatgagctctgaaaagtttatttcaaaataatccttctgtattaagcgctggctcattgacaggtccccttttatcgtaatttcatgaagtttattttccaaatgaaggtttatttttgcatggaattctgaggttctgcattgtgtatatgaagcaattagtttgggatttctggaatttattttagaccagacagatgtcttcaatttacacactctgggaggtgacaaaccctattaacattcgaaagctatcaatttgctttatctttgttcttaagcacacccagctacgatccagggtaattctttttgtttgattgtttattggtcttgtgtttttatgtagacagaagtaggaatttaaggaaaacacggaagatagcttcagtaattttatcactgtcaaaatctagtgggttactttaagagccacgaatcacacctgtattagaaatgcattttttcctgactaaaattctttccttttagtaaccaccattgaagtctaaaacacatacacagtagctactcatcttttaaagtttttctttatcacgttggtgacttatgcctgctattcccttgcttacattgtctttttttaatcaatggttgtttttaccaggtaatagaaacatatctctaagctgcgtagacctcagcatgaatctgagtatttttctattcattagtcaaatccttcgtagtcaaaagtaagtgcactcccattgtgtacaaagtcctagactgtgttgatttgggaaggagggttcaaatgatgtccccgttcatttttattctgaacttgaagaccaaaccagggttattatttttttttccgatgcattctgcagccactagatggctccggagatatgctcgggtcttctccagagtcaattacttcgaaacctaacaacctaaattgctatttacttctcacatcgaagtccaaaactgcacgcgcattttgctgattataggatttaaaaactgagagtaggacccagaacttgatctgaataaactcagcccactattgggaaattttgtttacaaaatttgctttttattatgactgccgtattttattttcagtgaatgtggggcgtattgttactggccaggagaaagttagagactaacagatgtcatcggtagtgtcagatctagatcaaatgcagaatgattatacatcctgacacaattgtttttgaaatataggataatccattacggacaggatgtctgacaactctagttttagtgacattgtacttgactttgagctcatgctgtttcctttatcttggattaagttatttatgtatgagtccaatagaactgaaaacacttagaactaagattagaaggatactttcttaacatgactacttcagactacctcaaaaatatatatcaaaatatatttaatggtgaaatatcataaatatttctgttaaaatgaggaggaagaaaaatatgcttactgtcataatttaaaattttcctctggatattttagataatgcagcaaaattttcctctggctgttttcgataatgcagcaagtcaagggaaatagaaaaggtattatagaaaaggagagacaaaatcatcattgtgtgtaaatcataatttctttcttctaaaaaaacagaaggttgggataagaaaatagtgttagtgggtcagttataaataaattgtacaaaatcattaaaatttttaaaataattctacaaaaatcaacttcctatatgcagcaattatcaattaaattataacaaaaatatattatattacaatattcaagtatactgaaaagcaatgtatattaccatacagcaattactctcctgagtggcaaaaagacactttaaaaaatgaaagattatcctcttttggatgggaagaatattgtagatatatcaattctacctttagttagcttatagttttaatgataatccaacaaatattgcttcagaattttttttcaaatttcacaattttttttggaagttcatgtgaaaaatcaatagaagaaaagatccaagaaaataaggatgagaggcaattccattgttaaatactttgtttataatttatcatcaacctaaagtaatcacaaaaggcactaactactcaaagagaaaagtaagtattcttagatatacatgtgaattagtatttagtagggtagcactgcaaatttttcaataaaaaaacagattaattcaataaattgtttactattttaaaaataacaaatttaattccctaccacatacaatattgcaaaataaaatccaggtggattacagagagaaaatgatgaaacataaatatataagaaaactaaaagtgctgatttgaacatttgcacaatgatagggtaagaaaaatttttaagcacttaaaaagtatttacatattaaccaaactgttttttctgaaaaccagagaaagataactaaaattatcaacaagaaaatatttttaagagattaatgaaaagatacaattatccacaatatatcgaagtcttagaactctataaaaaaagaaaagccaaaacgccacagtagaaatgaacaacaaagacatgaacaatcaaattcccaatgaaaaaatacaaatggcaaataaacaaatctaaacattgtaaactacactagtagccaaaaaaatgaaaattacaattaaatactgtttttgtctcaatttggaaattactaaaatgaataattacacaagtgttaggcaggttacagaaaaaaaatggacactctcatattccagtggtggatatgtaaattggaacatcatttctgcagggcaatttggcagtgcatttcaaatacattaaaatgtgcatatcttttcaccgaggaatgtcacatttaggaactgattagatgtatataaaaacatctgtacaaggatgatcacccttttatttcttattactatgaggatttgatccaaatttaagtgttcagaaatatgagattaaacaaactatagtgtgtacttaaaattcttttatctagacattcaacaaatatttatttacttttacaaagataatatgcattcactagagatttaagagataaagggctaagaaaatgttcacaggatactgctggatgacaaaagcaggtcataaaacaatatgcaagaggaaatcccattttttatgaaagctgcattccctggccttcaagagagtgaggttacaaacaacgttatgggagcattaacacctgtgttatgctggcttgtagagcccatgatcgtaactgtagggttttaaatgccttctaaacatttcccctaattggtacattcctgataattttagagatttaacttctcatggtattctcaatgttcttttcttcctacttaccaaactccaaactcactaaatcagttttgagtttgacctctcctctctacccaaagtcaacctacactggaatatcacacgcctcaatttcaaaacaaatgtccttgctatggtctgaatgtttgcattccccccacattcgtatgtggaaacctaatcaccagaggatggttctaggaggtggggcctgtgggaggtgattatgtcatgagggtgaaaccctcatgaatggaattagtgccctcataaaagagtccccaaaaaggccccttccatttccgccatatgaggacacagggagaaggtaccatccatgaatcagaaagtgggctcttgccagacaccaaatctgcagtcaacttgattttagacttcccaatctccagaactctgaactacataaatgtttgttgtttataagtggcctagtgtactcaccacacacacaaagcatgtttgtgggttgcggctttactggatgcttgggatgatgtggtgggatatggctcacagcactcaaagacctttgactacccatctcactcgggagtcctcatggatagacagttctccacctcacctgtctcttgatgaccacttacattcttcagggttttccagagacacagaacaaagaggatgttgtgtctcttccttttttataagggcactatcccatcatgggggcttcaccttcatgaactcatctaaacttaagtacccaccaaaggcaccacttccaaataccatcacattggaggttagggcttcaacatacaaattttaaggacagaaacattgagtccatagcagatggataataaaaggaatatacttctcaaatccagattgtgatgggagtatttctcaacaaacttttgcttgatttttgacacaaagtcctgagttaaataatcaacccaacattttttttttaccagaactcgaacttaagacctcaatatttttatgaagatattttgataagcactattttaaaagggctaactgtgaataaactagatgagtagcaatcttcctacaaagctgtcttatccctaataatagtaaagctatacaaggttttaaaagttatgcacatgtgtatgtttatatatggtattggtatctctggttttttttttttttagacagggtctcactttgtcacccaggctaaactgtaatggtgtagtcttggctcactgctgtcttgacctcctgggctcaagcaatccttgtgcctcagcttctggagtagctgggagcacaggtatgcaccaccacacccggctaactttttgtattttttgtagagatggggttttgccatgttgcccaggctggtctcgaactcctgagctcaagtgatccatctgacttggtctcccgaagtgctaagattacaagcctgagccactgtgcccggcttgtacctttaaaaaaaaaaaaagaactaaagataacgttttggttgaacttaaataatattccttttatatggaaatttggtctcctgtgcaattaataatcaaagtaacccgtgcaattaataatcaaagtaacccagtatacattctctcaaacttaatctttgtctcaaaatattttctcagcattattattaaatctacacatgcatcatataaaaaatataataaatgtgcaacagacataaaagcactgaaaaaaagcgtgagaaaaaactgctagtatatttatatgaaaataaaaaattgtgtatgttggaaatatccctccaaaattaaaaggcaaaatgaaagctagaacaaaaatcaggtcacattctcactacatattaactccttataaaataagaaaatgacaaatttcctcgtagaaaaatgggcaaatgtgtaagtagaaatttacaaaagaagaaacagaatagtcaataaacataagaaaaattgctcatacccattatcaattgaatcatggaaaattattaaaagttaaatacaatttttcacctgtaaattatgaagatgagaataaattataatactctgtactgtaaaatatgggaagaaatgatactctgttattaatggtagaaacttacattaatagtacctttttgatggactgcaagcattcagaaacaaaaatgttcatcagagtaatgttttaataaccaaatgtttcgaatatgttatctaaatcgatctgtgttcatctagtaatatacaatataatgttttgatcaatatttacaagcataaaacttaagagaaaattaatatctaaatttgactacataaaaatattaaaattctgtactaaaaaagcaaaactaagcaccaaaaatgaacaaaaaaagtagaagcaaactagaaaggagctcttatttaaaaaaaaataaaacaccctggtggaaaaattaataggcaacagctttatgatttctaggtgtggaaaaacagaaaaaacataaagcataactgtatttattaatatttaaatttttatattaaaatattatagtacatgaaataatgtaaattatgttagaaaagaagccagtttcaaaccaggagaagatattttcaatttataaaaatcacaaaggatcagcgtcctgatatttaaaaatttctgcaaatcaatgcaaaaatagtgacaaaagaaaatacaggcaaagaaagttaatagagaattcatagaagaaaataaatggctggtgaatatatgagaagattttcaaacagataagtaattggcaaacttaatattgaaatgtctgtctaatccattaggtagaaataaggcttaacaacactgagtattggtgagaatgtagaaaaatagaaagttttagaaaatcctgaggggagagcaattgttagaatttagaaaactgaaaatgtccatgccttaataattagcaatatcaacttcatttattatagagaaatatttgtacatgtgcacaatgagatctgtctaataaggatgttcactacagtactgttggtaatggaacaaaaaaaggaaacacaccaaaattcaattgatgaatgtttaaatgcattgtgatatttaagtgtaatgaattctaatagagtagctaagagaaacaaactacatatatatgcgtatcaacacagatagaactaaaaacatactattgaatgaaaaatagcagaataatgaatatagaattctaacatttttatatgctttaaacatgccaataaatatgatatagggttcatagctacatatgtagaagtatataaaagtaaacaaaaaatattcaaaatatacatactaaattcatgataggagttacctctgtgggaagagaataagaggaataaaataaacatggtggatgaagggaactttaatttaattattttatttattttattttcagacagagtctcactctattgcccaggctgtagtttagtggtgtgatctgggctcagagcaacctctgcctcctgggttcaagcaattcttgtgcctcagcctcctgagtaactgggattacaggtgtacaccaccacgcctggccaggaattttaattctatctgtagtttaacattttaaaagaccaagcaaatataagttacaaataattataaaaagtatatgtgtgcattatattactttttaatttctgaaagtaaaaattgtgataaaataagataaaataggtaaattggcaaaaaagccaaagttgataactcatggaagaaaaaaatgcaaataaccaaaaagcataggaaaaaaaaaacataattagtagtcaaggaaaaaggtaataaagaacaattgttgctgtatttgtttagtcacaaaaataataattgttattgtccataaagatatgaaaacttcttatattgcttggggtggtttaaattagcaaaatcttttgaggatcagtttttaaaatatttcaaataaccaaatagtcacatcctttgagtcagctataaaaacatataatgagaaaaaattaagctattaaaaaagatttgtatgtagaatgtttatggaaatgttattcatgatcgtttaaaattagaaacaaaataagtctctaataagtattgtacaaccgcatgatagaatacaatgtaaccattcaaaatcctgctgtggagtggtgtggaaagtttactaatgtactagatgttactatatagcaggtttagatatatttatatacacatatgtattttatattatatgtatgtgtgtacatagtgtgtgtgtgtcatgtatgtgtcattaaccagaggtggactgacttgcttgaagcttttaaacactgtagaaaagaatcactattttcttagaattgtttctagagatccaatgcatatgatcgtagtaagaagcaagtcttcacacattctaaagagaagtccccatgtttgcagctaggccattctttcaagactcatcaagaggtaaatgaatttgtcctgtaatcataaccccatcaccgtgtatgcggaagactagaaatttgagaatgtattagtgaatagttattgcccccatcattggatggcagtgctttccaccgcccctaatgttctacccactcacccataagttgagtgaggagagctctgaaacaatgtcacagtccattttgtgctgctataacagattatgtgagaccgggtaacttataaagaacagatatttattctctcatggttctggaggctggaaaatgcaagatcaaggtgctggtgtctgatgagggccttcctgctagatgctcacatgggagaaggctgaagggttagagaaggtgaaggtggtgttctcacatggcagaagagcacattagagcaaacccattcccacaagctctttttatagcagcattagttcactcatgaaggtagagccctcctgacctaaacctctctcattaggtcccacctcccagtgctgttgcttcaggtagtaagtttccaacacattaattttgggagacacattcgagccatatcaaagtctcccattaggtcccacctcccagtgctgttgctttaggtagtaagtttccaacacatgaattttgggagacacattcaaaccatatcagagtctgaaagaaggggagtctggcattgcacccctggctgcaaccttgcagagcatctaaatccaagagctcatcggcatgcattcaccagaactggaagcagtgaactggttctaggctgagtctgacaacagtcacagggagtgtgagagcatccatgaaggtttcttcttgcccagaaaatactgcagtgagtgtcttatttaattaactcagcccatggtggcagggtgaagagaaggggaatggacacattaaatttcccatgccggggttaagtgagtgtgcatttgttttaaaacataggttgtattactactcggtatgatgaggccaacagatgaagaggtaactgctgttgaaaagatactttgttacaatgtccaagaggaggagacacaccacaccacaccacacagggacacttagggaatcacaccagagtcagtcaggagacagaaagagtcagggaaaactgtgagcaggagcttttattgtggtttctgcgggaaggattgggagaggcagggtaagtagattcagccttagctagtttgaataatttcatcaggctctggggcataggggctgtccctagttttctgggacctgtccttgggtgactagggcagacaaagagtggtccctgagtgtgagagtccaatagaggaggtggagaggtgtgagaaagctggattggctagtttgcatatgaaaggcacactctggggccagttctttactttctttagtacttggctagtcctgggaggggcagtatctctagcgtcagcaaagccacaagatgtcaaaacatcagaactacagaacataaaaagccatgactaatagagcatttgaagaaaagcatcaggggcctatcttccccaatggaagagaatgaagtgagaattcctgtagggactttcagagagcctctctctacacccccggaaggtgccctcacatggatacgcgccatacagaggacacctatggccaagccagaaggcaaagaatatttagtgacaagttcttgccttttccctctaattttgcttctttggcctggccctatcctcagggaaacagggagcagtagagctatgagaagaaggaggatggaaatggaaagagaatgggggagtgaaaagggaatatggtgccacacccactgcccacgcccagtgcttatccttagggtgtaatgcgggcctgaggcctgatttgaaggaaactgagaaactgtattgcctgtgagattgagcttgttcttcttttcctttgtgtttgttacttttttaaattaaaatacacataatatttataatttcaaccatttgcaattatacaatccagtggtgttaaactcagtggtgaattttcctcctagaagtatagtttagctggtatgagaatgtctcatgactaaaagggaccagaaaggtttgacctattcaacacgttaccacgaggcaggaaaggaaaggatggagccacactgagcatcttcatcactaaagaggaatttttgtggtgtggtggagtcactccagcctagctctaaatgatctagttgtccagatgattcacttccttttcctcttctttgtgttcaccaaggccccctttgatcagaggttatgcttgataggtgcaccacaacttgagctggcatgcgtggaaaataaacttaagcatctgtaattcttcacattgttataaataaagtttcggtgccacaaaagaaatagtgctcgatataaaattttccttctcagcaaggcaatgtacttctatagaagggtgcgcccttacagacggagcaatggtgagcacacacttggacaagggaggggaaggggttcttatccctgacacacgtggcccctgctgctgtgtcattcccctattggctaggattagaccacacaggctaaactaattccaattggctaatttaaagacagtgacagggtgagtggtttggcgggaagcagagcaggaaatcagaatgagtcagggtggagaatgagtcagggcagagcagggaattggaatgagtcaggatggaggaggtaattgaaaaaggttgctttacgaggaagttaagtttaaaagtagaaggcaaagaattgaacatactgacatattgattctttgaagagaaatttagaactcatatctaacattattgctctgccattctaaatgattttatcggcttcatgtgctttcactgagcatcatttaagcaagcaagaaataccttttctagatattccattaaagtccaaggtctggatctggtgatgtagaagtgactaggaactgcctccagtcatttttttttttttttttttgagacggagtctctctctgtcgcccaggctggagtgcagtggcgcaatctcagctcactgcaagttccgcctcccaggttcacgccattctcctgcttcagccttgcgagtagctgggactacaggtgccaccaccacgctcggctaattttttgtatttttagtagagacaaggtttcaccgtgttagtcaggatggtctcgatctcctgacctcgtgagccacccgcctcggcctcccgaagtgctgggattacaggcgtgagccaccacgcccagccacctccagtcattgaaccatggcaccagcagggttccttgggcacatctccaatagcaattactctatctcaccatgagaggtctgtcttctctctccctttctttttttttttttccttttgagacagggtttcgctttgtttctgttgcccaggctggagtaagaggtgcaatcatggctcactgaagcctcaatctcctgggctcaagcagtcctgtctcagcctcctgagtagctagaactataggaacacaccaccatgcccagctaattttaattttttttgtagagatgggatctcactatgttgcccaggctggtcttgaactcccaggttcaagtgatccttccacttcggccttccaaagtgttgggattgtaggcgtgagtctccgcacctggccttgtattattttccaacttagatgtctctacatcagagctaccatattctcagagtcagtcacggtgtagcactgtttcttacatatggtgcctactcaggaattacttactgcatttcactgaatagaatgtttcctagatgtttttctcaattcattgcatcaaaagattacccactacctccttgtggtctgagtcctcttctttctggaagtagttcatcctcaaccagctaaaggtcaaaatatctcctgcaattagtgatcccctgacagaggggcctttgatgcgctttttatttttagatggagtctcacttctttgcccaggctggagtgcaatggcgtgacttcggctcactgcaacctccacctcccaggttcaagcaattctccttcctcagcctcccaagtagctgggattacaggcatgtgccagcacgcctggctcatttttttatttttagtagagatggggtttcaccatcttggccaggctggtctcaaactcctgatctcaagtgatctgcccgccttggcttcccaaactgctgagattacaggtgtgagctgctgcacccgacctatgaacttcttttccttttaaaaattatttttaaaaattgagatataattcgtgaaccataaaattcaccctttttttttttttttttttttgagatggagtcttgctctgtcacccaggctgtagtgcaatggcgctatctcagctcactgcaaccttcgcctcccaggttgaagcaattctcccacctcagcctcctgagtagctgggactacaggcatgtgccaccacaccaggctaatttttttgtatttttagtagagacggggttttaccacattggccagagtgctcttgaactcatgacctcaagtgatccacccatctcggcctcccaaagtgcattcacgcttttaatgtttgcaggttggtgatctttagtgtacttatgatgttgtgcaactatcacaacgctctaattccagaacatttccattacctcaaaaagaagcctcaaacccttcagcagttgcaccccatttccctctttcttagccccagaaactgccaatctcctttctgtctccatggatttacctattctgaacatttcacacaattgaaatcatacaacttttaggcttctgtctttgaatcacttctgatttcaatttaacagtaatttaatgactgatccaaataacccattaattcatctgataatcaccctcagaacaaaaagatgaaaatagttcatttcaagaacgttaaagccagctaaataaagacacctatcgccaacttttaagtagggaattaagccagaataaaaatttaccctaaccctcccttcactcgcttagtttattccaatttattattgcctagaaggttcaagcaaaggtgccaacacatacaagtctatcatcataatccacacactgcccagggaacattcccctctggaaacaagagctctggggtctggagtcctagtacttggcctggaatcttgcctccaccacttcctatctgtttgacttggggccaaattaatttacctctctgctgtttcatctgtaaattagtagttcctactccatagggctgttgtggagactaagcgagttaatggatattgagaatattaaagagggctgacctcacatggcaagtgctcaaaagctattcatgtggtaagaggaatagattgctgtggaaatgttgtatttagtatttatgttccttctattaactatgctcacgtaggtgatggcagagatcattcctcacacttctcagaactacaccagtctttagcaaagtctattgccatatgcaggagcgagatccaaaataggtagcagctttatgggacaggctgtgcgcggtcagcactggcagatgctgctttgcagaagtaccctggtgtgaaccttttagctggattgcgggaaagcctgggcaggggcagctgctgactgccgggatggttgcgggggactccccaggcactctgggaaacagctttacccaactgtagggaagtgttttaatattttgtccactggcaaactgaatgtcagcctgactttacaactaccgaatgaatcacgttctttcttactatcctaaacctaaatgaagcagaaaatcaatataattataaaatagttaatgtcttttacactccacccagtttcaggggagttaaagcaaattttcttttagtgaaaaaaaaagtttaatgcagaattgtgtttagattttgtgtatctcttacacttcccaaaaggatagatggactagaacctggggaaatggccctgaactaaccagttccctctatttgctcatctgtgtggcatgagtatgttagatgaggtaggagatggtttagattctttcatctctttcaattctgttattttttcttctttagttacacagctccagccagaggtatagcccagggctttagggcacagtccaaatccaagaaagtaggaatgctacgacaaatccattgggtagaaaaatgcacctaacccacagagtgattcatttgcccctgaaaagggttttgctgttacaaatttttgtccagaacatttgagcccgtggtagttcagtcgagacacaaagtggtcaacattctttgaacaaatctgcttttaatgtgtagagtgttcttgtttccagttattattctgagtgattaaacaaactgccaaactttcactgcagtggtcatcgtttattactgagatagttactggggacttaatagcactccatttgagacaatatcttgagccttgtgaattcaaaagaaaagagatgtatttttggcacaaattgatggggtttcaagatttctgtaatagatacatacacaatcatattgttgagttgaaagaaatgtgtttccaataagtagtatttactggggtttaacaacgatgtaatagttacctgtctattacatggtagtcaaagctaaagaaatgtgtttttaataatcaattggcatttcaaatatataagataactgccatatgaaatcggaacctagatacaatccacatttgagacttgtttttgagagtctcattcatgattctgaagtattaatgattggttattgtaaaaggaatattattatcaaagggataataatttgtattcatttctcttatactttctctgcttttcttctttcattctcccttttccttttacttctccttagcagttattttattacaccttctattttaattggttgggattgcattcggcctgtataaagaaaatgatccttcctcccaaccagaaagaataaaaagtaactgaatgaatacctttggctcttttaatccatgccaagaggaagaggtgagacaaatcggagagccccagtgatagatacacatgcactggcagattcccttgggattaaccctgcctgtaactttgcaataagaatttgtgccactctgccgggtgcagtggctcatgccagtaatctcggcactttgggaggccgaggcaggtggatcacctgaggtcaggagtttgagatcagcatgatcaacatgatgaaatcccgtctctactaaaaatacaaaaattagccgggcctggtggtgcatgcctgtaatcccagctactcaggaggctgaggcagcagaatcacttgaatccaggaggcggaggttgcagtgagccgagatcgtgccattgtgctccagactgggcagcaagagcaaaactccatctcaaaaaaaaaaacaaaaaaagaatttgtgccactttccctccttgggccaccttgaggccatcccattctccaacattcccgcagatgttgcctcttatattcatacatttggcaagtatttgcaagatgccttgtcaatgctaaattgctctaccagatgctggtgctacaaaaacagaaggcagagtacctgctttcaaagaactctcagtccaaaaggaaagtgggactagacaagccataaggagaatgcagcgtggaaagaagtgggcatcatccatgggagcccgaagaaggcaatgacccacacagctccagccagcttcattctatagcacacacaggtaaagtatggggtgaggaccattcaaacagtgatcatggtgatgacgcaacctactctcctgtattatgtggcttagaaagcacctcctccccagtccttccctggcaggagctctttccctctcgctgtcattctcctgcctggaatgctccttccctgatggtctctgtggctgtgctctgctcatacagcagatctcggctcagatcaaaagagtctacctgagcaccctcccagaaagggtcttcccagtgcccagaccccctcattttttcacatcagacacaaagtgcaagctgtaatgatcccgtgaatgtaatgttttctcagctgtctctccctagagcaatgcaggctccataaggatacgagctgctttcaacccggttgactgctgcagtcctcacaggcaggtagaagcgtatctggtggtggcaggaacttcatcctcatttgttgaatgaaagaattcatgaattcatgaatctgccatgtcatgcccagaaggctggataatatatgccactttgtgtccatcatacgattgctttgccacctgcccagccagcactgcctctacagaagaaacttagagtgcttcgtctaggaaggatccctgggactttgtactgagcatcttggactggaaccctggcaatgagtgctgacagccaatgtctccagccagatgtggcctgatgtggcttcttggcatggagctaactgcagcctccccggcccctgccctgagagtggaggtggacaactggaggaagagcagggcaggaggtatgctcccgtgatgccaaaacctcttaggaatgagagctcattcagagcatgtgcctcagctccccgcctctgccaagtgtcaaacttcattaaaaggcttgggggaagatcagttgcagagcatggctcgtctgggccaaggcaggagttctttccccaagctcaagagggctttgcttagcagctctgcagagattggcaactgcggttgaacttgtcagactgtgagctttcttcaggatttatccaccccaacacgagcacattctgaaaagtagaaatctgttgagaggtgattcattcctctgtggggccttctaattctacctcccaccactcccagcctgtctttcctctcttttggaattctgagagccccacgttaggaagtgttctttgctgcttaaggttattgattgttggaagaaatttattccaataataaaaataataacttgaattattaaaatcctttgaaaaatgaggaataatgtttctaaaggtacttttgaaattattgctacacaaatgttagctcactttgggttctgagcctgatgaaaaatgttaagatagtggcatttcaatatccatgaaaagaaattgagactcagagaggttaaaaagtttgcccaaagtcacacagctgaaaagcaatggagaaggaaccacaagacttctattccctctaccattccatctcattgtgattctcttggtcatttccctctagatatggcttggagagacagaaagtgaaaaatccttcataacttgggaaatactcctttcttatttaaaaaatcgaatagcatacatatcacagataaactgtgagattaaatatatcagcaaatattcacatataagcatgtgtcatatgtgtaaacgcagcttacacaatgaggtatatgtggttttcataggcatttttaatatttcggaatatgtccccaaggatgaatgttctgcaaatacacacttaagtttctctctttacaaagaaccccaattttgtaacttaatatttacaagaaagtgatagctagttttacactgtttatactgttttacacagtattaaaattattacttgatattttaagcttttatgaatagcgatcttttttattagtttcagtaatacacataaaaactacttaatctgaactctactaatttgaaatttatagccattcaaacataaactcttacctttgtttggctaatgggaaaaacaggtaggcaaatgtaaaatgtaaactctaagtgtttgatacactttaaaaaatacatatttcaatctctttagaaccagctgcttatattgtatacacattttatttattaattaagaaaaacccccaagggtttctgtgtgccaataattattggtttagctataaattatggtatagtcttgagagtaatgctaatgtttttttaaactatattttgaaatgttactgattcaggctactagttcagattaatagcatttaatagcagtggagtttgaagccagacagatttaatttgaattccagtgctgccactttttaactgatgtccttgaacaaatgacttaatcctgatgaatgtcgtcatcttctaaactgggacatttctgagagagagtaaaggaggtgtcaattactctgggacaagcctaatcagaggctggcctggggaagccagacacatggttactctatcaaaatgtgactctctcagtctttggcttatctaggttgttggtagatggtggatggcattttgtttcaatttttctgtcactgctttcaactataaggaatcaaatctccttatccaagccctgtgatgtcatcttaagtctgtcacattgagtcttgggaattttttttttccgagacagagtcttgctctgtcgcccatgctggagtgcagtggcgtgatctcggctcactgcaacctccgcctcctgggttcaagcgatgctcctgtctcagcctcccgagtagctgggataatagaccccgccatcatgctcagctaagttttgtatttttagtagagatggagtttcaccatgttggccaggctggtctctatcttctgacctcgtgatccgcctgtctcggccccccaaagtgctggaattacaggcatgagccaccgtgcccggccaggaatattctttttttttttttttttttttgagagggagtctcgctctgtcgcccaggctggagtgcagtggcgcgatctcggctcattgcaagctccgcctccctggttcatgccattctcctgcctcagcctcccaagtagctgggactacaggcgcccgccaccacgcctgactaatttttttgtatttttagtagagacagggtttcaccatgttagccagggtgtcctctatctcctgacctcgtgatccgcccgcctccgcctcccaaagtgctgggattacaggcgtgagccaccgcacccgccggccaggaatattcttattgagattattattaagtcacacttttaggtgtagaaaagtcctgtagtcgagttgaaaactttatatgttaattcaaaactttccttctcccccatatgagactccacctgtggtcctggcatagggagaagtgtattctctttttacatttctctttgcccttttaatcctccttcgtcttctcagtgtactacttccagctcccctagggggaagggagttgataaggagattgtgggaaagggcctgtgccatctgctgcaggcttcctcaggcagtgcacctactgtgcgccatacacggtatcaaaaatctgtgccagtggtggctttgatttgcatccctttggctaacggagatactgagtatttttacacttgtattctcctctgtagattacctttttatgtttttggttgacttacctttcttgaatttttgtaatggtgtttttttcactctcttaacataaaaaggaaataaacaactatctctatatctagaaatggtaactattaaccttttaaaacattttctctatctttttaaaaacaattttattttttagagcagttttaggttcacagcaaaattgaacagaaggtacagagatttccccaatacctcctgcccccacatgcacagcctcccctactatcaacatcctccaccagggtggtacatttgttacagtcgttggaccgccattgacacaccatttttacccagagtccatagtttaccttagggctgactcttggtgtacattttgtggatttggacaaatgtataatggcaactatttaccattatagtatcatacatattagtctcattgccctaaaaatcctccgtactgcacctattcatccctcaatataaatggagtaattgacagtgagcccatagagttttgcatctgtctgtttttaatagaagaaataaaacactgaagataaaattgaggcataatttaaaaccataaaaccataggaaccatgaactctagtatattattaatgtccatgttttaagtttatataaatggtaaaatactctacccatattctgtcatttacatccttaatcaacaatgtgctttttagccaggagtaggggctcaagcctgtaatcccagcactttgggaggttgaggcaggcagatcacctgaagtcaagggtttgagaccaggctgggcaacagggtgaaaccctgtctctagtaaaaatacaaaagttagccaggcgtggtggcacgtgcctgtaatcaatcccagctactcgggaggctgaggtacaagaattgtttgaactccagaggcaaagattgcagtgagatgagatcgcaccactgcactccagtctgggcgataaagtgagacttcctctcaaaaaacaaaaacacaattgtgctttttagatctttccattttgtacataaatatatattatctccactataaatatatatttataaataatacttattctttccactatgaaactatatttatctataaatgtataagtaagaatatattttctgtattatataattatacttgtatttatatattatataattatatataagattatatttataacaatatattatatatttataatatgtaagaatatattaatatatcaataatataagtagatataaaagtaaatatttatattgtatttatgtaagtatataagtacatttgtaaatatataagcatatttaaatatatattatatataacaaatatataagaagatatattcttttaaaaagtttcttttaattgcagtatagtattccagatgtgtatatgattatttaaagccttatagctgccctataagattctatcacgtttctaaggttttactattacaagcaatgcttcagtaaacaatccttgcacttattttcctgtgtttgtgtgcaaatatttactgaggatagttacttgacgtgtactctctgataagatatgtgcattttaattttgtgtgcttctgacaaaatttccccactcctgctagcaaagtatggtgcaccccatgactccatattcttattagtaagtgacaatagtaccaaacattttcatttttatgaatctgatgaatgagattgttaaactaaatctgacctgcggatgcttctggacctggagtccttatgtagtaaactgcaacctaacttgttacacaaacaagctgaaagcctagcctacgagtagtctcagccaatcacagcagctgagttttcccaatcacagactgcaaactgatcagatcgtgttcaagtaaggcaaacccggagctgttaccaatcaagctttttttacctcactggtgttttctttccgtaaatttacctccttgcgtgcatccacccataataagcataaaatcactataaaaatcataaatgaaaaggctgatatacaattgcacaaaaattaacatttaacgccttcacacgtttcggaagtgcttcctgtagttctggttctgaggatgtccagttagagaattgctctttgctcaattaaactgtgttaaatttaacttgtgcaaagtttttattctaacaaaatacaaaagtgttttaattcgtaattgatttattatgcctcactgtcctttatttcattaatattgcgtgtgaccaatgtttagcatgcttaatattcatttctgtttcttcattttttgcccacttttccttcaggataatagtttttactgagcttttaatggatctatacttactcagcatattagccttcattttgttccatcgtgtattttacttttaagtatccttatggtgttttggacacttagaaatgctaagtttttgtgtagttatatacgtgcctttttctttatgatttctatagtgcttttatactaattatgattggatacatgaatgaatctgttttcagataaggatagaattttgtttaaaaaatccacactgatgagggcggtggctcatgcctgtaatcccagcactttgagaggcctagacaagtggacctcctgagcccaggagtttgagaccagcctgggcaacatagtgagacccccatctctacaaaaagtactaataggtgggcatggtggtgtgcacctgtaattctagctgctcaggagactgaggtaggaggatcaattgaacctaagatattgaggctgcggtgagccatgactgtgccattgcactccagcctgggtgacagagtgagaccctgtctcaaaaaaaaaaaatccacactatataagtcatattcttaaacagaataggaagtaaaattatatgaaaaagttaatggaaataagtaaaaatattacctgaatttttaacaacatatgtaatttgagttaaggccccagataatgaacatagatagctacttacctagtttatccttttcaggtaccaggatagtcccagttcagtgaaccctaaaacaatgtttattgcaatgattatttctggacatcatgtcacaaacaataaattttttttaagaactgttttgtgacattgtacatttgagtaacatattccttttagtgtatagataaccagcaacataagattattccaggaataattagacacaactacgacataaaaacaaaattatcatgtggccaaacatgagcataatcagcttcttttaataagtgacatttgaagttatcacagtgaaccttcctgatattacacacagccattatctgactgacacttcctgtgtgtaaattctactccatctgtaattgtcagaattgattatttaagactcggccggatgctatacttttctggacctggcatgtgtctgagtcactgcctcccaggatactatccttcatttgacgtgcactagtgttctgtgcccttccaggacaggatacctggaaagaaacccaagattcatagaacagatttgtatggtgtggtaccgacatggagaaaacacaaattgtctactggaccataatagataaaagttagaagtaaactattggtttccagtgactggcataaaaaaatagggcaacagaaattctcatccacagttactaaatattaaaatagctccaaacccaagtcactaaagctacccacatgaaagacactttgtgattccatggttgaaaacaagctctaaacccaatgggaatctttacagcaaagctggcctgtcattaatcagctaagggatatgggttcaaatgttttctgctgtatctttatatgggacagtcttattatcttatttcaaccgattctttgagtaaagattattttctcaattttccctgtggctgttgaaataatgtcgtcacttttgcttcatggagaattcttttttgtatctggtggcagaagctctcctatttccagatgtagaaaggacagagcacttttgaaacacatacagtgtcctgtgctcagcgttggctgtgtttttaatgcaatttgttatttaatcctcacaacagctctgcaagcttggggttgtggttcacaatttttactgattgggcgactgagatgcagaaaggccacagttactcagtttgtatgtgagcagtccaaggttcaaacccatgtctgttggacagtaaactacttttctttttactgttacactcttattgtacctgtttggtactctcattaaaaaatatgtatagctgagtgatctcggccaagccacattatctttctggcatactttatagtgcataaaataagaggagtgaatgaaataagtataagcgtttaacctcatttttctttcaaatatttgttcagtatatatgatgtactgaggatcaaaatactaaataataaattggcattttactagcaacaaaatttataaaaacatccaagagttaacttagtaagaagtgctaatgaaagcactaccaaattgacacaattaacattcataaaatataccatcccgaaatagcagaatacacatttctctctagctcacatggaacagtcactaaaatagactgaattccaggacataaaacacacttttataaatttaaaatatagaaatcatacaacatatgttcttacaccacaatggacttgaactagaaattattaacagaaagaaaagaacattctcagatttttggagatttgacaacatatttctaagtaatatgtggatcaaaaaagaagtctcaatatacacttagaaaatattttgaactagggtcaggtgcggtggctcacgcctgtaatcccagcacttgggaggtcgaggccaggatcacctgaggtcagcagttcaagactagcctgaccaacatggcgaaaccccgtctctactaaaaatacaaaaattacctgggcatggtggagcctgcctgtaatcccagctactcaggaggccgaggcaatagaatcacttgaacccgggaggcagaggttgcagtgagcagagattgggccattgcactccagcgtgggggacagggcgagactctgtctcaaaaaaaaaaaaaaaaaaaaaaaaagcaaaaaagaaactattttgaactaaacaaaaatggaaatacaacttaccaaaacttgtggcatgcggtaaaaatggtgcttagcgggaaatgtatagtattaaatgcatatgtcagaaaaagaagatccaagtccaatctcataccttctgaatctagagaaagaagagtaatttaagcctaaaatgaacacgaagaaagaaaaagtatttaagtgagggtaggaagtggtgagagagttgagagattgcccatgggtacgatgttcactctttggatgatgggcacactagaagcccaatcttcaccagcacgcaatatacccacgtaacaaacatgcacaggtaccccctgaatctaaaataaaataaaatttaaaatttagattaaaaaatcaacaaaatttaaaacaaaagctcaatagagaaaaccagtgaaaccaaaagctggttctttgaaaagattcataaaattcatagacttctagccaggtgtatcaaggttaaaagaggcaactaaagaggggtaaccattacggatctcatcggcaaaaggaattaaatattctaccagatttaaggaatggcttgaccttttaagagaagaaagagctgatgctgctaacaaaatgatcattttattaacagatggatggtgttggatgggaggatgaaatcatttttagaagaatgtgtcacgtctcaggaagagccagtagatactgtgggaccatcagcaaatggacacatgagaaatgaaggagctggacatgccaaggtcagaattggtggaaacaatccaaccacagggctatgccactcccctaaaagagaaatggtcagtagtacaaatgtcaattccaaaatgaaagtagctggtgcttcgcagcggcttggaagtaggttttcctgagcaccttccagtcccctcaaataaacaaggaatgtgtgtaaaaataatgaacttgccattcgtgtgcagttttaaggaaggctcctagacaaatccttccccccatacaaaaggctgaccctaggaccctcctacgtagaaattctgaagtggtcattgcagccagtgaaatcaggaataacaaggaacttatttcagtatccaaaggagttccctatgaggatgggtcacagctgcaggaacgtctcaaaaatcacagccacccacatagatgacacagcacctcatcatggttccagctgagcggatgaataatcacctccctagggataaggcatacagaccagacccccagcaggagttctcagtgttagggagcttgctagtgctctgtcacactcacggcaaggctgcttgggggaacagggagaacagaaaaggaagacagaaaatctcagtggcatggacagggcgaacaagaataccaattcctgccacaaacaaaaagtgtacttcagatcctaacttcaagtaatttaattattattatattgttcattttaaagctaagaaaacaggtcagagcaatcacttagtatagctaataaagtcatgtaacaattaagtgacagagctgattaagattctctgaactgaaataagattttctgtctctatcaccatatggacttcctactattaattcatggtgtctgatcaacattgtcagctgttgccttccccagcaccaagtttttgcagccgtcaagctgaaattcacactattttctagtcattcatgagcaggtgcatattaacttctctggagttgtttatgcctaaaatgagagtagaattaataatatcaacattagcagttgggaatatgatacactattaattaacctaattgtaagtgaatctaaaatctaaaagattttataatctaaaaccttaaaatctaaaaggtttacacatatatttggttaaaggattctgtaaagatgcataacttgggggcataagagatatatgtaatcataagagctgtaaatacaaataaactcttcataggagtaagtttagattttgtagaaaataaagaagctaggaagccatttactgttaggaggtggaaaaacctaggttatctattgtcatgaaatccaggggcaacaagttctcaaaaaagcatggaaactcagtattgttaaaagcccagtacattcaatgaaagcaaagtaactggaagtggctagaaggaaatctttgacgatcttgatgagagaataatcaaggaagttattggaatgaaccccagactgcatggaatcaaaattggcttgaggtaagtgtagcagatggcataaatgacacacaacttggggcagggaccacacaccatttgcttaagtatctgggcaatgaaagggagaaacagcagtagtaaagggaagtaatagttttcttaatagctgatgagatctgtgcagtaagagtagagatgtaaaaaacagatggacttagtgttggaagcaaaactccaagaagctgagaatgaatgggatcatgagcatgactaggggtgtgacacagtcacctagagacagagctatgctttgatgaagaatgagatggataaagttacagagatggtttctcttactagaaaaaacttcaagttagatttcctgttgggcaaatatttcaggagtaagctctatgccagggatctcaaactcaaataccttctggaaccaggaaggtgatagcatgagtgaactgatgtgacaggcaattactaaagaaccttaactttcctccaagtgaggtgctctctcccatttttcttaaagcacgcaagcaaccttcttagcttatcttttactttctgaattttgatagagacatggtcagggaggagggttttcctttattgagaaatccaacgttccatgtgtgcttataaatacaactgccacttggtctcagagtcaaagacacaatactgagtccaaatggagttagaatgtgtgtcctaaagagaaaggtcactaaccagttcctactcaatttaatcacgtgagtgtgtaggctaggaactgtcagatattttaagagaagccagaactctacctgtttatgtgaaatattctcattttcaatgttggctcaattgaaaagcaaaacaaggctaggtaggccatctgggcagcagacctgcccacgcatcaatctccatcctctgttgcagacattcaattaaacctgtcacagaccaggaaaaccacttttgatacctgaaagtcaaagttacttgtggttttctttggttgcactgattaaaggaaagaggaaaaaaaaatcctttaatgccaagtgagcaatttgggattaacggtttacctggacaattgctaattgggaaaacagagcaagacacttaagctaaacaggttctgtaacagttgagcagttgtttgtttgacttggataaaaggaggcattgttatggttgaggtaggttttgctttacctgctatggcagaactacatgatgtggtcatccaacaatgaggtcttggtaaaataaattatggtgaaatgctatgcagacattaaaaaacaatgatttagaaaaagatttatttatcttgggaatttctcattctatattggttattgttccagacaatgttaccaaaattttaagttttaaaacagattaaaatattatacgcagcatgatgccatgatttcatacgttattatcattatttttaaaaattttctaaaataagaacttctttttcctagtagtctcttgtttaggctctgggataacgggaactgatgctgcagaaagatgtgactcaggattgtggaactttaggaaacttgggggttattttatgatatcattcatgccaagggagccaagaaatatccacatctatgctcatttcagactatttcacaaagatgctcccaaattccacattataataccttttcaatttcctcccttcaattctgtctccctccgtttttggtggagactgttgtttgtcttcaaatatccattgcttccatgatagaattttaactgggcactgggatgctcaaaaaaaaggcaacattttatcttccttggcaactagaagtaacatgtgactttctttttttctttgccagtgtggtaaaagaagaaggcaactttcggaaactgtcctatagggctgttgtcccatgacctgtgccctcttcctctttatagtctctttctgcctcttccggcctatgtctggatgctgccatcttgaattccatggatgacagctatgctgtagggatgacaaggtttcatctggaagaagacatctgagaatattttgaagcagagcttccaacctctctgagctatatcctcagagcctaatttcttcctaagaaatatgcctcccttacttactctagaaatagacatatctgatgtgtgtgctgggatgaggccccttatgaaccacaatcctgcctttactattttagacaaccaatgactagatcccttgatacccccatttaaatttctaaaatactaagttgatatattgggtaagtaagaacatctactctctaatttttttttgtcagaactttgctcatggttttaagaaccaaaattaataatgcaactaaaaatctgtcaagagtcctcctataaccctatttacctttattaattttttttgcttttcttatgactttattccacaaagtaaacattaagattttcatattaagtgtcctcgaaaactatgtgaaatttttaatggcattttattaaagttatactaaaatgaagagaatctatcacttttctatagtaaaccttttctcccaataaaatattttcatgtatttattcaaatttttcctgtgcatagctatggctgtctattttcagtttgtccagctttttcttgttataaaaatggacatgatggcttctaagctctttccctgtcaggactaaaactggaatatttaagtcattttgaatcacttctttgtatctcatgaccactccaatttatggccttattagtgtttttccataaatttctaggagcttcctaattggccattctgccacaaggctcttacatttcctgacatacaaaaccacacttccattatgccattcctctgctcatcagctatcaatgaccagtagttgcctacttacaaaaataaaacttttttattccgatatttaaggcagcttatagttgctttggtttgaatgtgtcctccaaattttatgtattagaaactgaatccccaaattcatatgtagattggaggtagggccaatggaaagtaattagaattagacaaggtcttcagggtggtactcccatgatgggactgatggatttataagaagaagagagacctgagctgacaagcatgctcctgtcttcttgccatgtgatgccttctgccatgttttgacacagcaagaaggtcctcacaagatgctggccttccaagtaagacacttggacttctaagcttccagaactgtaagaaatgcatttcttttccttataaattacccagtgtgtgttattctgttatagcattgtaaaacggactaagacagcagtctttcctcataatttgcctttggctactttccaaggagaagctcatgatccaggtcaggaatgctgtgtcattgcccctccaatgttagctatgttcatgttgactggaatactcaatacattttgtccaaaaattcctacttttgttttaagtattgtccagttccatatccacgaagcatgtacctactattctttgtgccatatgtttttacatggatgaaaattataatattcctggaagaaaccccagaattctttggattcctgagacaggtgaaggggctttctgaaggacacatagctagttgaagtcagaactaggcttacaactcacttccctttttctttcatcaattttgggtctcctaaagtagtgatttgcaaactcattggcatgcaatgagtttaaagaaagagaaaaaaaatattcctggagcccatctcctgagattcggacttagtaaatgagagttggtgctcaagattttaaattttgagcaaagaactctgatgctggtaattgaagaattcactcactgtcaaacactgtcatagaggacatttacagaacatagaatggtgattggccttcaaggaatatctggccaactggactggtaaaagcatagtaaagaaagtgacttccacctgactgtattaagtttgtccagaaatggctgggcacgatggctcacgcctgcaatcccagcactttgagaggctgaggtgggtggatcacgaggtcaggagtttgagaccagcctggccaagatggtgaaccccgtctcttctaaaaatacaaaaattagccaggtgtggtggcggtgcctgtaatcccagctactcgggagtctgaggcagaagaatcacttgaacctgggagacgaaggttgcagtgagctgagatcgcaccactgcactctagcctggttgacagagcaagactctgtctcaaaaaagtttgtccagaaaataaaaaggccttctcttgaacttttgggcttccaactacaaataaaaatcttgttggcttatttaaacatgtatgccattagttatcagcaaaattggggaatgtcttaatacaattcaattttgacactttaaatacatgtgttcactattaaacataaggaaaactaacctctaccctcacccttcatttaagtaaaggcgaaatatataatcattgagaaatttgaggaaatactgaaaaaatattaaataagagctactattacaatcactgtggagaacattgtggagattccttaaagaactaaaaatagatctaccatttgatccagcaatcccactactgggtatctacccagagaaaaagaagtcattatacgaaaaagatacttgcacttgcatgcttatagcagcacaattcgcagttgaaaaaatatggaaccagcccgaatggccttcaatcaatgattggataaagaaaatgtgatatatatatatatatatatagtgatatatatatatatatagtgatatatatatagtgatatatatatatatagtgatatatatagtgatatatatatagtgatatatatatagtgatatatctatatatagtgatatatctatatttatactgatatatctatatttatggtgatatatctatatgtatagtgatatatctatatatagtgatatatctatatgtagtgatatatctatctatatatagtgatatatctatatgtagtgatatatctatatatagtgatatatctatatatagtgacatatatagtgatatatctatatatagtgatatatctatatatagtgatatatatagtgatatatctattgtgatatatataatgtgatatatatatatatatatatatatatatattccatggtgcgtgtgtgtatatatatatctggataactggactggtagaagcatagtaaagaaagtgaccttcacctgactctattaagtttgtccagaaatggctgggcacggtcatggaatgctacccagccataacaaggaatgaaataatgacattcaaagcaacatagaaaccagttgacaatagggcctatggtaaaataatgcagatgtaatgaggccagccatggggagctgctgcaagaaggaaaggagggagcccattgtgaaagaccatcagaaggtgcagagggtgagacaggtagacagagaggagagggaaaaagagagagaacacagcaacgtggatggaattggagaccattattctaaatgaagtaactctggaatggaaaaccaagcaccgtatgttctcacttataagtgggagctaagctatgaggacataaaagtataaaaatgatacaatggacttcggggactcagaagaaagggtgggagggaggtgagggaaaaagactacacattgggtacagtgtacactgcttgggtaaatgatcagtaaagaacttattcatgtaaccaaacaccacctgttccccaaaacctattgaaattgtgtatatatatatatataaattatctactatttattaaacttggtctgtgaacatgcatgttggcaccttacatggattattccatttaattcttacaactactctaagctgaaggaagtgaggcttagagaggttaagtcacacccaaaacacacagcaggtaaacaatagcgccaggatttaaacacgcaggtcaaattctgtagcctgtggccttaaacaccagactccctcttatggaaatcctatcatttctagccctgttgatcacaggaaaaccttcttagcatttcttgtacttcttcctagcccttcttaagaaatatgaatataattctgaaaagtctgggctttggagacaaagtaagcttgattcaatttctgactttgacattaaccttgatttaacctttgacagtaactttgatttaatatttctgagccttagttctaccagctgtaaaatagtgagaataatatttaccttgtgactgaaagcaatttaatgagataatggtcatgaatgacttagcactgtgcttagctgattataaggactcaataaatgctattgtgattaggtatataattcaaattttatatatttaaaaattgaagttatacagaaagtacaggtttatatactatgtgttctgctacatttatgatctagttaagccaagtgtccaaatgccggcactgtatacactcttgtctaagaaaacatatcccacccaccatccctggtattggatagcggtgatttatcataggtaaatctttctcttccactcctcattctcagatctcattctcctcccaccctttctactgagtctccaaagtccgttgtatcattcttatacttttgtgtcctcatagcttagttcccacttatgagtgagaacatacggtgtttggttttccattccagagctacttcatttagaattggaacgcacctgaaacaagggtagacaattcagccacaggctggtgaccaacatcctggtacaaatagttgtactgagcttttagaaagaccactgagaaatgctatgaaatgaaaccagttgacaatagggcctaccgtaaaagaacgcagatgtaatgaggccagccatggagagctgctgcaagaaggaaaggaggtagcccattgtgaaagaccatcagaaggtgcagagggcgagacaggtagacagagaggagagggaaagagagagagaacaaacacaggattccaaagctgcttcggcctccagctctgatttcattcatttccagaaagttagcccacggggattttacttggaattttcaacataattcttaagttaatttggaactaaagtacacataaaaataatttttaaaaaatgaatattgaagagggtctttccctgtcagttaaaaaatatgtcataattaaaatagcaagatacagtgtggtgcagacaggctgaggagtggaactgcaaatgaagtccagaaacatattatcagtataaaaatattccataatgaagacaacaattttaattcattgggggaacaatggatttgccagtaaatgataatgaagtcattggctcaccaatttgaaaaatagcaagctggatttcttcctcatactctttaccagcataaatttcataagaattaatgatttacattcagagaaaaaataaaagttttataggaaaaggcaggtgattacataattttgggatgggtgaagagttttctaaggacaatatcaatggcatcaaacataaaggaaaatatagtggatttgactcatggaaattaaaaccattcgcgtatagaaaaggattaactactaagaggctaattataaatttgaaaaatgttttgtacaactaacaaagggtaagtccttttcatatagaaaagacccttataggccaggcatgatggctcgcgtggtggcctgtaatcccaacactttgggaggccgaggcaggtggatcttgaggtcaagagatcaataccatcctggacaacatggtgaaaccctgtctctactaaaaatataaaaattagctgggcatggtggcacacacctgtaatcccagctactcaggaggctgaggcaggataattgcttgaatccaggaggtggaggttgtagttagccaagatcgtgccactgcactccagcctggcgacagggtgacagggtgagactccatctcaaaaaaaaaaaaaaaaaaaaggaagacccttataaataattaagaaaataataaacccctattagaaaattgggaagtggagaccatatatggaatcagttccattttctgttatatatattttttgtaataacatatttacttataggtatatatgtttatatttgctttttgtaaaaatatatatttctataaaaagaataaattttatagttaaataaaaataactaaagagatttaccccaaattataaaaagtataacaggatgatgggtgatttttatttgcttgctttttatctttctgtaatttccaagtttttagtgataaatagattttacttctggaatgagaaaaaagttttcaaaaatagaagaaatacaaacaatttgtgaatcacagtctaagtttgctgtctctatcttgttttctcttgatgctttgatttgaggtgaccacagatgctttcgggaccctcgctgaaggtcctcagtgtagcattccctggagcccctggatatcctgggcttggccaagagcttggaatgtattacacagaggaagccattgtcagagctgggcttactggctcagcctgtctcctaaaggcgggttcctgggaccaaaccagagcacaatgaagaaagaagggaaaatagccattggcttctaccacaatagagagagcatggctctaagaactttccaaggcgtttccaacttgacatttcctttcttgaccttttagcttcttactttccttcacatacagtggcccagagttaaatttagcattatctttagaaaaaggcaatttccccaagaactcaaaactacaaacttctgaactcaagaagacagattcaggaatagcgttgcatttggcttatttaacacagagttacatatccttggaatagctcctgactaactcaagagagtcagcaggtgtcttcacaggattgagtgagacttggatattttgtggtctgtttcctgtacaaacgtatgatgtgctggagtgataacgcagacattattacagcattctgcaatgtctcctcattgctatcccttgatctgcatccaaacaaacataaggaaagagatgttgctcttgacattaacactgatggcaatcttggtacttggggtgatgtaggtgctgatagaagtcagcaaggagggtcagatctttacggctttgaacctgtctactgctccagcattatctctcaacaagccccagtcacttcttgccccctgtgttttgattttgcagaatttcttgggttgtctcagtggcccatgttctttgaaagcctctggtcttcctcttggaacactggccccaactcatcctctccaccagcaaggcatgcctgacctcttaggcttgctcagaggctcttgcgagcatccattgatttcctggagccaagactttatgtgttaattttctgtttactcctctggctcccctactccctgtgtgctaagtaactgccaagtggtaccacagcagactgcctagtgcctggattctagcatccaaacaccagtgttcaaatccctgtcctggacttgcattgttgtctgtgttcattaagtggttgactcaacattttaccttctcttcttttacttgtaaaatgtggatgaagataatgaaacctatcttacgaatttggagtagggaaagcacatgaacaacttagtctagtgtgtggttccctaggaaacagtcaataagctttagccagtgcaattagccagtatcattcttgtcagtttatagcacagcctctaccacatacaaggtgctagtcatattcctgtttggttgctcttctcttcactgtctggccacactgatctgtatgttcctaaaacaattaaactgttttctgcctcaggacctttgcactcactgttccccatgtgtggagcacatttccctgactctttccaggtgtggctgacttctcctcttcctatttcagctaaattgccacctcctccaagagcattttgggctaacactatttaaagtagataacccccctacactctgttttatctgctataacaacactagatttatttctccaatagttacttcattgatttacttctagaatgcctgcttcttgcactaacctgtgtaaccttctgagggcagaggcttatcaacctcgtctctcaatatctccagtgtctatctagtgtctagcacactacgtaggtatttgttggatgaataaatgaatgaattaatacaaggactgaaggaatgcatgacttgcagaaaattcagctatgcaatagttggcaaacaccgaaaggcctagcagaaaatccaagctctcctgcagagtcagctgcaaatataggtctgtcttcattttcccttatcaagactgacaagacgacacaaagtcctttgagctctttggaagggaatagcaatgcataaactcaaaagataatcttgtttctttttatgaattcaaaataatttttgaaaaggaacaggccctctcaaagcattatgcccacacaatctttgctttaagtagcaaaaaactcccaaatagttttatgatctctaatgtaatgcagatgtagagggtaagaatttgatggtcaattaatttagaaagtatccagggcctagcagaggttcaacttattgactttgaaatttgactcatgattccaatgttgccccccacttttttctccatctctagatataaaaagaaaggaaagcttgtaatattgcttacggaatgttctagaggggttgttaagctgttcttcataaaaactcttggaccaagttttcctggccgtttccaactgggaccgttcctgagcattgaagtgaagtaatattaaactggcaggctgctgagagccgattattgtggggagttgaaaggaaagagctggcatctttgtgcttcattaatcttagaaagaaagaaagctctggccgctggaccaaatgcccacatgtcagagcttgatttcctgttcttctgggtttcagtctgaatgcaaagcaaatgtttcagggagctccaagcagctaggaggtatgttcctttcccacgtgaccaggacttaaattcatgaattaatacccaagtctgagaaagctgatagttatccaggctagaggcaatatggtgccgggaactgtaggcacagctagtaattaattaatcaatgaaatggctattaagcttccttgatactattggacaaaagaaaatcctcctcttgttctccaaaattcttcacgcatgcctccatgtataccatgctactacatggtaatttgcacatttattgcatttgaatataaagttttcctcaagagagaacaaactatgaaactgtatattttagtaacggctttattgaggtataattcacatatcatacaattcatccattaaagtgtacaacttaatggtttttggtacatgcacagttgtgcaaccatcaacacaattaattttacaacattttcatcacccaaaaaagaaattctacaccttttagctattgtctcaccataacccatatcagctctccagaagctcctggcaatcactgatatactttctgttcctatatatttgctaagtctggatatttcatataaatagaatcatacagtatgtggtcttctgtgactggctgtaatagcattttttgtgacttatttatcttggtgacaggcacaaaaaagatgctaataaaaatgttatttgaataaataattagcttctactatcaattaatcactgtgcaataactgtacagaaggaatatatgacataaatcttgaccacaagttatgtttaatccagatgatgaggaaagattgatccaaaatactaaaattaactaaatcatatgccctaaaatgctcaaataagtggcacataggcaggaaaaataagatggtatactgaaaggtgcttttctagagcaaattttggggcaaaatttttaaagtaatatagatgtagtttacgcttggtgaaaaaagataaaccagccaggcatggtggctcacgcctgtaaccccagcactttgggaggccgaggtaggtggatcacctaaggtcaggagttcgagaccagcctggccaacatggtgaaaccccgtctctactaaaagcacaaaaattagccgggcgtgatggtgggtgcctgtaatctcagctactcaggaggctgaggcaggagaattgcttgaacccagggggcggaggttgcagtgagcagaaatcgcaccattgcactccagcctgggcaacagagcgagactccatctcaaaaaaatataaaacaaaaacaaaacaaaacaaaacaaaaaggacaaacctttggattccaggttaaattctcatcaaaatattactcttggctccttcatccacatctatatttaaacgtacatttatatcatctatttctacaccctcattttcatctataattttctataaaatattcattgtgtttttggaaaagcatcacaaagtttattttcttttagtcattgccatgatttcttctcctgaaacataaataaggaaacctgcagtttgattgatgactactagacaatctcaaataaaataacccttcaatggctcccattctctatttctccttctgatccttgattgggtgttgtctaaatctagtcttctatttgctgacttaccatgcagtgctctacctttctcagaagcaggagccccatcctgacaagcctttcccacagggatattccactctgcttcagactccctgtctttcaagtagagatgattttcattttttttctcataccatcttcttcagtctgtttcaatgaaaccatgtgtgcttgaaacctgagaatcatacttggcccttcctagttcttcccactctatatccaattaatcatcaaagactattaatgcctgctgtagattatatttgaccagttatttatttttacttgtgtctagctccctagttataaaatgcagataactattgccaacctcacaaaggaaactgtgaagaataaaaggcacagacagtcagctcttcaccttagagtagagagttcacattcctaaataagagtcctgattctggagtctgcctgagggtggttctctggctttggagcagtcacttctctgtgtctgatataaaataggagcattttatatcagtaattgcatggggtggtggtgaccatcaagaaggtaatctatggaaagtgtgtggaagaattcctggaagtatgcagaaaacgcaacctttaggtagatacgcacattttgcgtgcctcactttgtcaaagatggaaccctcatggactgtcctaagcacaggtctgaggtgtttgacctccacctgcattcacaaggtcatgactttacacaaatgtatgggtgtggctccttttatgctctggccagtaagacagaggtagagtttagggcctatgaatttgtgtgagattactggagctgtacgttaataaagagacacatatttagaaccatttaaccccactccttgctttagatttttgtttaaaggaaaacatttggaatttgctgtgagatagtgaaccctggctgatgttgaacaagcttctactagccactttaaatggacaaatccatgttacatgaagtcaattttgagcataaaggctaatctccagcttcctcaggaacactgagacttacccaaacactaaaccaactcattgcattatagttatgtctcacactgactctctcactctttctctgtctttcttttcattcttcagcctaaaagataagtatccatgttaattatccaacctatttactattgtacttctgagtggtttttggccctttccaaaaaacgtgtgtcacagccttggggccatgcccacgaataatccagagaggatatgaccagaggaagcatagtttttataagtgcacagcttcccaagtgtcctgtgttcaacatttctgaactcatttatgtttatattatccgagatgtttgataaaagaaatcagagtcattacctacacacattgggaggaaaaaaacccccaaatttcattatctttgaataaaatcaacctatctttatcctagacagccatctccaaaacgcttttttttttggctgatgattataggcatgttcacaaggaaaatttaaaaaagcccattcagcaggaatgcctacgtggcttgagaaggaagaggaattctttaaaaagctccctaaaacagccagttctctattggactcccgaatcctttctccactgtgagtatcagttacaaatgcatcaggaagcctaatggttttaccatcttctcctagcacaaacatccaacaatatcacagggagagctatagaggcacactgcaatctgcagtccttccactctcctgtggcaaagagccaccattctccgaagcagcagcaccttctctgtcccaagatttggtcagcaaacagcccttcaggctctggatatgagacttgcccactcttagttccaaatggcaaggagatggcaatcattaaaaagagatcattactaatagcatatttttaaaactcagcctggtttccttttttagccctcatgaaagagtaatgtaaaccagtcctactgcattggaacaacttttaaataatgccagacactcgccaataacagcccaagaaaaaggaaaagtgttgatttaagaaaactatccccttacacatgttttttcttcttttagtattttgatgggcatttagtaattgttatgtaccacaagccagtgagcaagacagccatagtatctgctgtcaaagagcttacagtctagcggggtgaacagaagaaaaaactattaagagagggtaagtgagggctgtaagagcatgtggagaggcatttaatccagctgtgggaaggtcaaggatggcttgctagaggaagtgtaacctaaatagatacaccaaggatgtagggagagtgctagagaagaaagaatattccagacacagagaaaacttgtacaaaaatctgaatgtgaggcagagcaaacgcattggaaaaactggattgcagaaagatgaaagaaggaactgtcttcttcagataatattaaagcaccttgagcaatctggggtccgtgtgtgtctaggttggcaggggctaaatagaggagtgaacttaccggatttgccttttagacaaagcactatgcggaatggatgagaggttgtaggactgcaagcggggatgccaatggctggctggtatcaaaatctagacaaggggatggtaatctgaactaaggtagcactcatggtgatgagtagacaaagacagagttcaaggtgtccaataacacagatgctaacaaccttccagttgcaagaagatccttctatggaggtagcctccctgctattgatggggctgctgagatctattaataggagacatatttgactagagatgcattcctgtggatggtgaagccaaatatcagttgattgggtttgctttgtcacttccaaatgggagcacgtccaagttaggatgactgggatttgggagatactacaggcattgagcttttatctttcagccaatatgacaattttttgactactgtagctttaaaacaagtcttaaagttaggtagaattaggtcttcaagtctgtttttcaaagttgtttggattactctagagtctttgtgtttcctgtggattttaggatgagtttgtcaatgaaaaaaatactgctaggagctaaaatataattgcatgatagcaattatgccaagattaagaaaatttgcctttcacgtaccattctgaggaagttatttgaggattcacaccagcaaaaacagagaaagatcagacaggtaattgtggaatgcaggaaacagccctagattcccctggcatccacaaagcctggaaagcatctggtctagattgtagcaagaggtcagaggggtggatggacgtccccaaaagacagtgaattccttgccttagtagatgacataatgaaaagattggaatattttgaagatataatgggggcatattatgtttttggaaattagaaaaaatgaaagtgtttagaaactctttcctgcaaagcaaggggaagctatacaggaaatctgtggttagagcattaaacaatcatttaaaatgaaatttttagaaaaacatttgttagagtataagtaaaagaaatctatttcaccttgattcagaaaatattctactttgtatagtgcagagattatcatattgaagcagtaaaggaaatgtaatgcctgtacaagactgggctaagcagtaagaataactaccagaataggagtctttgctgcgtgccatgggttaattatagaatcctcacaacaaccccaagagattcatattatttaccctttttagaagtaaaggactgatgtaaaaagaagttaactgagttgtccaagatcataaagctagtaagtaacagagcaaatttcttaaacattgttatgtgctgtttttgtaaatacagatatatttatatatgaaatcttttctgtacagataaataatatttctggtttatgaagtttacaatcaacttatagatatgtcattctagaacacaatgctaattctatcaatcttcgcaatgtacggatactgatattgttagtggaagttgataactgggataaggaaaggtggaagatagggtaagaagagtcatattcccatcgtacgtggggaatgtgtctaaatttaataatgtctaaatctgacaaaccagacatagaagtataagcatattttaaattataaatacaatcaatgagaaagcgttaataattatgtaacaccaaaagtagaaagcaaggaatagggaaagatggggattgtgtaagtaactaagtcttcagttcataatggcaaagtaatgatagtgtctaaaatggatgtcaagcaatttttgtgtaagcatattctatatctcagtggttcttaactcctacaatgcatcagaagtacctagtgggcattaaaaataataccactgcttgagtcccacctccagggatctggatcaatgactatcaggaaaaggcaagtatggggaacttccaaaaacttccaggtaatttttaatgtgaagccataaaggagaacctctgatttaaaaacaggtagatccagccgggcacggtggctcacacctgtaatcccagcactttgggaggccaaggcgggcagatcacgaggtcaggagatcgagaccatcttggctaacatggtgaaacaccgtctctactaaaaatacaaaaatttagccggacgtggtggcaggtgcctgtagtcccagctactcgggaggctgagacaggagaatggcgtgaaccctggaacacattctaagtttgtcaacctagaaatatttcaaattaaaatcacaagtttaaattaaatattcaattacccaattaaatttgcagtaattgggtggccactttagtaagccaagttttcttaaacataacgagttcataagcaccaactattaagactatgatgttctttttcttctacatttctttcctttttttctttttttattttgagacagagttttgctctgtcacccaggctggagtgcagtggcacgatagctcactgcaacctccacctcctaggttcaagcaattctcctgcctcagcctcccaagtagctgggattacaagcacctgccaccacacctggctaaatatttgcatttttagtagagatggggtttcaccacgttggctaggctaatttcaaactcctgacctcaagtgatccacctgcctcggcctcccaaaagtgctaggcctaagccaccgtgcccgacctcttctacatttcaatgctgaattcttttttttttttttttgagatggagtctcactctgtcgcccaggctggagtgcagtggcgcctcctggcttcatgccattctcctgcctcagcctccccagtagctgggactacaggcgcccgccaccacgcccggctaattttttgtatttttagtagagatggggtttcatcatgttcgccaggctggtcttgatctcctgaccttgtgatccgcccgcctcggccttctaactcttctcagagttatgagatacttaccactaaggaggatacttacccttctgagtaactgatgtgaatttaatcacaacttctaatgggcgtaagacatatagagcattgcatgcattcaggacaattctttctgccaattaaggatactattatattatcccatgtatgatgtggggttgctttctcagcacacttggggttgcaaaaagaaaaatttcagacaggatgctaacagaattcttgtcagcaactttgatgtgatgtattaaaccctattgataattgttatgtcaatggctctgtaactcaaaggaggttttcacatgctccaagacctctaaattcatgtctcatacattacctaattcctttttctactcatagacatctgtaacttgaacttaggttgattacctcattagatttctgtttccttggatcttaaattatgcaggtatattttctgcctacttctaaacatgtttgaacttgatggaaggctgcattgtctcatcatcctagaccacccaactattatacatattaaaataataaccaattacattttcagtatctcacatagctaccaggtccttctattaacaatttgtacaataagaacttaaataaaaacataaacaggaatgtagacattagtctaagggaccctgctgtgattagtttcacatcttttcataggaattaagctgcaccgatgttgtttattttctgctttataggtgaatacgtttgtatgtaaaagttagataacatatcccaaaacgtgtagatcataagtagcagaattaagacctaaacccagttctgattacaagtgtactatatattctattgtacctctccttaaaagctcagcaaaggagagagaaagaataaacacttgagagaaagttttccaatatcttttgaactgccttttaaaaatagaaaaacagcgtcataaaagggtctgcgttatccttgtttagtctctctggccaactttgattcttcaggaacatgccatggtgttgaaaacgtttctgtcacaagtgtccttgacgatctatttggaacggatttatgaagagttagtgactccataggcaggagcactggcatttttctttgctatatttcttttcttttcttttttttttttttttttttgtgagacggagtctcactctgtcgcccaggctggagtgcagtggtgtgagcttggctcactgcaagctccgcctcctgggttcatgccattctcctgcctcggcctcccaagtagctgggactacaggcacccgccaccacgcccggctaattttttgtatttttagtagagatggagtttcaccgtgttagccaggatagtcttgatctcctgatctcgtgatcctcccgcctcggcctcccaaagtgctgggattaaaggcatgagccaccgcacccagcctttctttgctatatttcaaactcaagagcccaagagtttgagattccagtgagctcagattgtgccactacacctcaagctgggtgaaagagtgaggccctgtcagactctgtagaaacttctcagagcacattcacagaggcttttggtagaaatccatcccatgccacaagttggtgttgactgtcgctgtccccaaaggtatggaataaaaacctgaaaagcaaagtgtcattttatggatgtgatttttaagtttttcttacccttcttttttaaagcggtggaactatttctttacattaaatcttgtttagaaagccaatattgggaggccgaggcaggaggatcgcttgaggtcagaagttggagaccagcctgggatatagagtgagaccttatctctacaaaattaaaaaatctagctgagtcaggcatggtgacgcacatgtgttgttccagctacttgggaggctgaggagggaggatctcttgagcccaagagtttgagattccagtgaactcagattgtgccactgcaccccaagctgagtgacagagtgaggccctgtcagaaagggaaggaaggaaagaaggaaggaaggaaggaaaggggggagagagggaaggagggagggagggaggaaaggagggagagagggaggaaggaagggaggaaggaaggaaaggagggagggaggggagggagggaagaaaagagagacagaaagaaagccaatttttaaaaagctaaaaacaaagtgactctagtttaaatacaagttagagatctgattcctttcccctctgtcttccactcttatgcatttcctcaacacccacaattgtccgtgaagtagggtttaaattacactttcagagaaagagcatgatgttctaagcacaccgcttctccagaaaacacctaaggtgatcacttcttagaagccttctgtctgctctaaggagaggaagcttgagcatggtatctatagaggtaaatgtcattctgactccttctccatcatctaatactagaaacaaaagcatcattgttccagccatacagaaggcttatgtgatgtttgccagatgcagcacatctctaccactttgtgtaagacaaatatgtatttgtcaaagaataattgctaagtgtgactggtagagtcaagtgcctgtgggagaaattttccctcccttctgtttcacttctaatcccagatgtgatttttgcaagttaagggggtttatcagaataaagctttcccttgaaagggggttagtctagttactccctaattctgcttttctcaccaaatcttaactggctattaggcagcaggcagagaaataatgaaaaaggaagaaaatgtgtccaggccaaccttaccagttaaccgtggccttggggagacccagactccacaatgcttgaatgctcaatgcacatgtaatttatagtacagttattgattgcttctgctacctcagaattatggaaacattcttggaagtcatcaagcaaaaaggtagagactactattatagcgcttacactatccaatagtttgtggttttcctttcacataaacttgggagttgaaacccaaggctaagtgggaattacagccataaaaaacatgggcatctattttattccctcaaaccacattgaagaactttgactatattatccaccctaaagtccaccccacaaaaaatttcaaccccaaatccccttaaagattaacaagctgacaaaccttgctaatgtcagagagaggaaaacagctccctgctaactgccggaaatggactccagacttcctctttcttcagctgaggacactatgtaactgttcagaaatgtgaaggtttcttaaagcatgatgactattacaggactgagacagaggctcctcctggagccaggtagccacatacagccaatgaatcagaccccagtctggcctgatgttcaacaaggagatgatttataatgggatacagggacagccggcagatacacctcagaagttggataatccagaccagctgagcgtagattgtgacatttctgtctctgtccacgtcattttctttctgcagcacgtgaggagagcaggtctttgagagggcagcttacagacatgcagcacataaagattcaggcttatcaagaactggttcaactatacgtccttctgaaaccaatgtcagcctggaggaaatatcccagcagaaattagactccatggaattctggaaattgtaaaaatgtcacaatatatagaaagactattttttcctttctgtatttttggggggtggatggctgagtttatagaaaatcaatctttatttcaaaaggttattagttttataatgtataacatactctgagccataatcattatattattttgggtctgtagatatgtaatattatatcttaattacctaccttgtataaacactatatttactaacatagcaatacactaggtgtatgatattattacttcaataaacgtgtttaaataatatacaaatgtaactctgaaatacatgaagcctatggactgaaatataatataaaggacaatgttcacaaaatagtaaaacatacatatcacattttcaaaaatatctctagacctttctctatagaaaaaaaaacgaaattttattgtgatcttatttccagtaccttaactgaatctaaacccatgaagctgagtaaacatgagccaaccagttttagccaggaatctccactgtattttcttcttccttattcttttctaccctcctctttccccttcctaaaaagaaagaaaagtaactttttcctcctatactcacacatttctgacaccaaatgtgtgggattatttcccccacacacacacacccatcaattatccagttctcaacatttgctgactgggtgtcctctaatttgattcaattctgacactttttacctgaggttagcatcagattccacaagttaagggctcaggcagtcccacaacactatgcccactgccttcagacgccagtcacaagtccaggttgccacctgtggttctgaaccactagttataaatcagaggttcccctgagcccctgttcagatttggtgatttgctagagcagttcatggagctcaggaaaacagtttactactaggttgcagatttataataaaaggatacaactcaggaacagcaggcggaaaagacggtggaggcaacggagcttccacaccctctccaggggtgccactctcccagctcctccacatggccaccaactcggaagctctccaaagcccttcagttactggtttcttgtggaggcattatgacgtaggcaggaccaattgttaactcggtttccagcctgtcttcccttcttggatgatgaagaatgcgtctgaaaattccaagtttctaatcaaagtttggtctttctggtgacctgaccccatcttgaggctactgaggaacccagcaagcatcacctcattagaacaaaagatactgctgtcactcaaggaactgcgagggatttaggagttacgtgtgagaaaccgtgatcaaagaccaagtattagaacaaaagatgctcctaccatcacttaggaaattacaagtctctggggagctctgtgccgggaactagggacagaagccaatgtatatttctcatgatatcacaatgtcacactcttgtttactgccagctctctagcagaacacatattgccctaaagtagcttataatttccatcccattgctactctatacttttggaaaatgctctctaaatagcttcgtcttggtttttgcttttttgataagttgtcaagactagattaatatctaaattaattttttttttgagatggagtttcactcttgttgcccaggctgaagtgcaatggcacgattctcagctcactgcaaactctgcctcccaggttgaagcgattctcctgcctcagcctcccaagtagctgggattaaaggcccctgccactaggcccagctaattttttttgtatttttagtagagacgggatttcactgtgttggccagttggtctccatctcctgatctcgtgatcctcccgtcttggcctcccaaagtgatgggattacatgagccaccgcgcccggcctctaaattaaatttttataattaacattatgttttaaagttcacagggagaattgaaaagcttattatacaaagaaaactatctagtaagttattttcaaaggaaataagaaccagggagggttgagactgctgtccttcaagattaattgctaaaagatattggagaaatccatacagacttttgagaggaaaatttgggaaccctcaaattcctggacaaaatgtcatacatgtgtgaagataatggaaagaattccagatatgcaaatttcataaagtatacaatccacatacttatcctgaaaaatgtcttccaaagatgaactcgaatgtcataagaaactaacaattttggaaaactcaggctcagtaaagaggaagtagaataaaaagtttagaatagaaatttgacattgtttaaatacataatttggtttcacaaacttacagttacaaagaactatgaaaataccatagttcattcagaaagaaaagataatgctttcaaatgagaattatagtaatcagcaacctctgaaatctcatacataaaatgggaagtgaaaaaaaaaatgaaattttctagttttctttcctgaattgcagagactattttatacttgagatagaccattaaagagctaaagaatgcattaaaaaattaaactgtaattaaattaaaaatagagtttatatcttaaaattccatagagaaaataaataaatatacataatctatataacaaaagatagtaaaagaaaaacaatgtacaagcatatattaaaaaaaataaagcaagatggcatgtggagagcaaatgtaaattagaaactggttaaacataaaacgacaaagaccatcaacttgtattacaaaacagaaggcaactatattctgcatccaagagcacactgaaaacagaggaatctagaaaacttcacattcaaagggtgtgaaaacatgtcaatgaactcaagttaaaagaaaccaagaatcagctgggcacagtggctcacacctgtaatcccagcactttgggaggcctaggtgggtggattgcctgaggtcaggagttcgagaccagcctggccaatatggtgtaaccctgtctctactaaaaatacaaaaattagccgggcatggtggtgggcacctgtaatcccagctactcgggaggctgaggcaggagaatcacttgaacccgggaggcagaggttgcagtgagccaagatcatgccactgcactccagcctgggtgacagagcaagactccctttcaaaaaaaaaatatttaatacttcatgttttattaagatcagaaggcaatgggacatccttaaagtgcttttagaaagaattctatgtgcataaaccatgtatgtcaaaaagaatagtgaaataaagatatttcagataaataaaaaacaggaaatttgttacaaaagacctgaactacaatatataataaaatatactctttggactgaagggaaatggtaccggatgctaaattgcatatacaggaaggcaaaaaaagcaccatcaatagtaagtatgtagggaaatgaaaggtgactgactatggtatgtagaagtaaagtatttggcactggcacaaaagaagcaagaaatggaattacactctggtaaggttctccttacatagtatgtgaaatggtatattaattataagtaaactgtgataggttaagaaagcatattgtaatcccccaaagcccagtaaagataaaataataaagacagaaatcagtaaaatgaaaaataatgtagaaaatcaacaggttaatacttggttttttgaaaggattaaataaaattgacatagtccctaggaagactaatcaagaaaaagaagacacaacacaaataaccaatttcagaaataatagagctgatacacatcctatagacattaaaaaagagacgagagggatattatgaacaacttttcactaacaaatatgataacatacataaaaaggacaaattcctttaaaaatgcaatgtatcaaaactgactcaggaagtaacagaaaattagaatagcttaactctattaaaggtatttaattcataatcaaatagttttccccaaaaaaactccaattgtatgaaacatttaaggaaaaaataataccaatcttatattagctctctaaaaaatattggaggaagaaatgctttccagtttgatgagtccagcgtgatgcatatcccaaaactaagtagacattatattgacccatacgacttaataaacgtaaaaacgatcagcaaataaaatccagcaatatataaaaaggatgataatatcaagtgggtttgctctaggaatgcatggccagtttaacatctgaacctgtttggaattttgtggctcttttgttaaattttgttaatttcttgttttattgtattgtaaccacataaggtagcctgtatatacttttccttgtagaaatcactgacaattttttgtattgtagattataaccaattttcaaaatcatccctggggttttgtaaagaatatctattccctgttggttaaaaagcttgacatatctagtaaatcaaccttatttcttttattatccaattaagcatgttatgtctacttgaccaaatgtggtgtgttaaaaccatcaacattcatatttctgttaatgccatcgtctacacttaacaagagtttttactttataaattgtgaggacatttaatttgatggataaaattacatgccaattatatctttatttcaatggataattattgtcaaactgaaacaatttatttcctttttaatgcattttctctgcatttcatgttttttgttgtgtaatggcaatattgtcactttgttatcctttttactcaaaattatgtaatacgctataacctttttttttttttcccccaaagtctccctctgtctccaggctggagtgcagtggtgccatctcggctcactgcaacctccgcttcctggattcaagctattctcctgcctcagcctcctgagtagctgggactacaggcgcgtgccaccacgcccagctaatttttgaatttgtatttatttatttatttatttattttgagacggagtttcactcttctttcccaagctggagggcaatggcgagatctctgctcacggcaacctccacctccttggttcaagtgattctcctgtctcagcctcctgagtagctgggagtacaggcatgcaccaccatgaccggctaatttttttttttttttttttttgtatttttagtagagacggggtttctccatgttggtcaggcaggtcttgaactcccaatctcaggtgatccgcccaccttggcctcccaaagtgctgggattacaggtgtgagccaccgtgcctggcctatcacccatttatatacatatagtgatactttggggtggaattcttacattcatcacacacctgaaattcttaaaattaatttgtgtgcttgcaattaaatttttttattttgaaataattttaaattaacagtagaatacaaagaaattacagagggttcccctacactctttaaacaactcctaatattaacatcttatagaaccacagttgctacacagattttgctagttttttcactaatgtcattttccttttctggatccaatccagggcactatattgtactgttaatcatgtctttttgctctcctctaatctgtgacagtttcttcatctttccttgtttttcatgactctagcacttttgaacggtactgttagggtcttttgtaaacatattcctcaatttaagtttgcttcatgctttctcataattagactgtggttatagatttttgtgggaaaatattacagaggatgtacctgctcatcacatcgtatcaggaaatacatagtatcaacatgacttatcaccactgatattaatgttgatcatttgcttcaggtggtgtctgccaagtttcttcactacaaaatcattatttttcctctccatgtactacttgttggaagcagtcgctaagtgtagctcaaattcaaggagaggggaattaagtcctacctcctggagggaggagtaccaaggaatttgcagacgtatgttaaaaccacacaggaattaataaatacgatggggagaactctgagcctatgaaaacttcctgtttaaaatatccttgaagtttcacccactaattttagcattcattgatggatcttgccagcagccgttattactttggtattctaatagtgatattttaattcccttattccttctccacttagtaattggaatttttctgcaaggaatatttgtccctccttcagttattcattcattaaatcatttgtttataccagtaggaatttgtggatgtttgttttattctttgggttataattcaacactaaatattatcacttattctgttgctcaactcagttgagcttggccattgggagctcttttgggttacctcttgtagccttttgacatgccctcatccttttttcttcttctccttcttctgcttttttaatacgcttttctttctgacactagaagatcccccaggctcatcttgtattttctctgccctggccttaaccttataatttattagctatttctttagagagccctgtttccttttattggagaatagtatttaaaaactaagatcaaggtgctggatgtgctcattgccactgcggtgttacttttagggagcgctcagtatgcaatatgtgtatgtgtgttaactcatgtctactgtacaaacatttctatatttcggtatctatctgcttatccatatatcaaatatgcataaattcatactggaagctctgacttttatccagcaccaaaaggaaacttctagccttccctccttccttatttctaatttctttctctgatagcgagaagctgattccccttaactacattgctcatttatttctttggctgtagcgcacttgtagtttcagaattgctcactcttacccatgtgcaaaatgactttgttaatatttgtgtatccttcattttccttaaagcaacctatcaaaactctcttctccaatttccttaacccatcaccttttcctccccactctgcttgtgtttttgcgaaggattgaaacacgaaaactctgtggtcttttctcactcttttctggagttctaacagaagaaaagaattctgatactagcctgatttttacttccttgagtttggatttttttgctacctggacatatttatagcaaattccttaaactctaaaatataatcaacataagtttggattttagtcttgtttcttaagaattaacatgatgtctttctttgatttaggaaaaattttactttttcatttgaggcgaacatgaaaactctctacatgtgaaatgcctgcatgcctgggcaggctctgggatgaggaaggtggtttcctcttaagagatgaatacaggccgggcgcggtggttcacgcctgtaaacccagcactttgggagcccgaggcgggcagatcacctaaggtcaggagttcgagactagcctgaccaacatggcgaaaccctgtctctactaaaaatacaaaaattaggtcgtggtggtgggcgcctgtaatctcaactactcaggaggctgaggcaggagaattgcttgaatctgggaggcagaggttgcagtgagctgagatcacactattgcactccagcctggcgacagagcgaaactccgtctcaaaaaaaaaaaaaaaaaaggaaagaaaagaaatgaatacaaagactgggagagaagcatattttccatattttgtccttagccccagtaagttttcaagtgggtcctcaacaacagccattccttctgaaaaccctgatgaaggcaaaggagccaccgctgacatcatcaaggctgaatttacccaaactggagctgataaccgtggctaaaattagcgtggctgtgaatgagacgccacttatgaaagacaaaatcagtaagtggccctcgagctaagacttcgtggttggtattttggtctcatgataacagctgattcaacatcagtataaaacttgggttgagaattggtgaagaggcatgtatttccactcccaccagacattgtggagacacggagatgctggggattggccagaatggccgtgtgtgttaagtgtgagcttgtgagtagatgcttgggtactgctgagcccctgagtgtctgaatccccagaacacactcctgaggccatctccccatgtccactcccaaggtgctgatccagtccccaaaggtcaggaagccacctgcactcccagcttggaaaggagagtgatgctggcagaagacaatgaagattgggaagggttggctggtttctattcagttacatgttgcaagatcactctggaagggaggcgagtacatgagtaagagtgagtaggagtctttgttatgtacatggtgtaatatttgctccacaacctcagaacagatagatcattcgcgactcctccagtgtgggaagatcagagtatcagaatctcagattactcaaagcacatctggaaggttttactgcatgggtctatgaccctggcagatgccctgtctggatttgggtcctgggtcttcctctatgtggtctgggcagatcggtcagtttcttcaaccatagagtagggacagtcatctttgtcctgcccacacagggatgtcctgaggctcacacaatagacagaatgtgagcatgtgtgaggaaagctggcactgcagacacagctgtccaccattgagagacaaggtgaggcagcatccaggaaacagctccggactctgacaccagcatgattatccctgctttggccctcagcaggtgtgaactgggaaagttgcttaatcgctgtgcctcagtttcctgggaaagggacactatccatccctaaaattttattgagaacctggtacatggaggcctaatttctctgtgcctggcatatggcaagtgtaattaaacaggccctattaacctggagctgttaacccgccctagaaggttcctgcatctattgaacaacctgaactttcagaaattcctagatctttccaaattaattggaagaaagacacagaactgccttctggcctcctgtgaaatatatgtctccacagagtcctccttattttccatttcttaaggcattccatggcttgcttatcatggatagtgggttttaaaactaaaagggatattttggttcctccaacccaaatccatccctttgtagagaaggaaattgagtcagaatgttcagacaacttgactacagacatataactaagtttcatgctggagccaggctttctcaccctgaggctagtgttctttccgttaaagcttaacatgtttcaatgatattcacaggacttaagtgcccttaacatctagcaaagactggaccgaaccccctttctcacgacttgtggaaagtccctaaggtttctgaggatttcccaagagcttggattcttatttctccgtgaattggcgtcctctatgaatgcgcttcccgtcttgcattgtgctgaccttattccatgctgggctgaccttttctgcttcatttcagtttcaaattcagtttcttttcagtctccaattcagctgcacgctctcctgtctgacttctctctttgctccaggccttcctccttcctttcccatcctcctttcatgatgctttgtgtgttaccagataccaaccctggtctttcagtccctcaaattactctcagactaagttgttgtgtggcagccctttaaaaaagggttcggtttaacaggcattagttaagaaaagcaaaaacaaacaaaataattctcactttctcatatggagcaattcaactgctaaacgcagttctgggccacctccctttggcactctagcttagaattcaccacttaattagattaagcttacagaccaagaactcttttttgctgtgtgatgcaatatgtctaccacagcccctgaatcataatttagttgtttagcaattctacctgcaagacagtttcttaatagtcctggtagaaagccacctgagaagactgattatcctaacttgagacaaatgttcattcctggactaaaatttatggccagaggtggggtttactctgcccaggccagtgcagcaggcccaggcctgcaatggtggcactctggtttgcaatcatccatcctagccatgagaaagtgctccctactgggaagaggacttctggcatcagaagtggggaaggagtgctggaccagtaagagtgatatccatcttggacacgaacaataaggctaggggtcgctctgactaagccatttttccacatcgccactgtgttaatctccccgagtactgcacttctgaatttctcccatattcaaaaactttcaagacttccctttgctcagtgataaatctggttcattgagttgaggagaattattcaaggtcatctacaacttgcctccagcttacctttaattttagatcctgtatcttcttctaccctctttttttttttttttttttttgagccggactcttactctgtcgctcaggctggagtgcagtggcgcgatcttggctcactgcagcctctgcctcctgggttccagcgattctcctgcctcagcctcccgagtagactagctgggattacagacctgagccaccaagcccagttaattttttttttttttgagacggagtcttgccctgtcgcccaggctggagtgcagtggtgcgatctcggctcactgcaagctttgcctcctgggttcatgccattcttctgcctcggcctccagagtagctgggactacaggcgcctgccaccacacccggctaattttttgtattttttagtagagacagggtttcaccacgttagccaggatggtctcgatctgctgacctcgtgatccgcctgcctcagcctcccaaagtgctgggattacaggtgtgagccaccgccagttaatttttgtatttgtagtaaagatggggtttcaccatgttggccaggctggtctcaaacttctgacctcaggtgatccacctgccttggcctcccaagatgctgggattacaggcgtgagccaccccacccggcctttctaccctctttataaagcttttcctttggacagattggcctggttgctgttctacaaatatactttatgtggttctgcacccgggtcattacagaagctattgcacctttgtaagggctgccttccttcacccatcaaatccttaccatcccaagaagcactttcaaaaacccctctttgtgaagtctctcatgatcatttacttttcaccatccagtaatagacaggaaatggaagatgggatgtctatggacagagcttcctcctctcaatataacagcttaagaagcatgatgtttacatctaaagttactcacactgttactcttcagcaaaacaagagtgttggactcgataattgcaaggtcccacctaactccaagggactccaagggattggctaggagagttgctttcaggaagatataaataaacacctgcctctcacagtgttcactgccccctcaaacaataaatggaagacacagtttgaatatcagcttttctgcttatatggggagaatagaaataaagttcactttgatacatatctgtttttctccgtcaaattcatcaaatttcagaattgcacttgttcatccactgactttcctaagggtgggatagtaacaaattctgccaagaaaacaagaagcgaagtataatgaataacagaaccagcttaaaaatttgcatccaaggtgatctttaaactatggtttattaagcataacatatgaataattttccaagaaatgggccacacacaaaggtataatgaatataataatcttcatttccaacatttcattttgcagctccatttacttgaaatgatcggaggcaaaaaatattgtacaacatatttccttttcatgaacatacttacacactatgagagaatatgggatcatttcagtttgatggtgggaaaaaagtaaggaaacatgtagtgtggatttcaggctcaattctgagtattgtgttttgttcagcagtcaaatgaatttcatattattttgtcccaagttatcttgtcagaaggtatcactcccactgaagcattgggaagtgtcactccactgtcaacctgtctgacaatcatattagtaaacactggcggcttgataggtcatgcactgctctggaatacactgagagtgtattaacatatagagtatcactttgtcaaacctgcttgttaatctacatttacagatgtacagtagttgatggggttgaaatgcttccctgggcaggtgcacaatggccccaaaccaaaataagcagcagaaacagtaagcaagtcttgaggttggagtggaagttatctcctttatttgatgaatttcaatacctgcagactgctgacaaagtctgtatactcaggtttttctaacaaatggttcttccaaaagagcttaagaacatcaaacagacaccatttttctttcaatatagtatagaatgtgtatgaactaggaatcagtacttccagtgtatgctacttgtatggcctttcactagcaaggttacttaggtgctcaacctcagttttcttatctgtaaaagggggattcatccatctacccatttatccattcatggacatcctgcctcctgagactcacatgttccagagacgaagaactctatgatctttatttactttttatcctttactctgttctttctcccatgtaacctgaccaccttcccatttctatctatgtgctaggtcctaagttctcatgtgctgttggttacctagtaggttaccatctcatatttttccttgctgtcaccgtattaccatcccccctgcattcctgccacttaaaatcacagacagcagcattacactgtctattatcataagagccagccctcccatgccctataatttttccaggtcattaagtggggcctccttacttatgtaacatgttttctgctttacccagacctgttgtcattcacatttacattggaaaaacatgtaagtcctactgaagaggatgcaagcactggcaacatagggagagagatacctctgtgggatccaggagcatgtaagcctggggctgaaacagcacccaagaaagagactgaaccacggacaatggctgttgtaagaaatatccgaccaggggaatgagcagaaagagaatgccaggtcatggaagctaacatgagaataagagatatgctgctgattggataagtcaaaatactcagagctgatgaaaacggtaatggtgctgcatttattgacatcttaccgtgccccagaccctgtgctaattgcttctcatgcattgtctcatttaatcctcaaaatgactccagggtgattattacccccattttagagatgaggaaactttggctcatggttaaataatctgaccacagacgcacacacactgccagtaagtggcagacccagattcagattcaagccagacctcaggcccttagccaccacttttacagtctctcctcagccaaaaatcaagaaagaaaggccagagttaggagtggctggaaaaacagtatttctaccccattcatgttagaaacttacactctgcatttttgcaggtttactttatctatccaaagaaataatttctgcttatccctttttttcttcctcaggcataaggttagaggtatcaagaggctttgcattatgaataagcaacacccacacacaagaattgtaagcagtaaaggctgtcttctctcacatagcatgaagtttggggacaggacagtcttgggaattttattattatttatttatttatttatttatttatttatttattttttgagacagagttttgctcttgtcattcaggctggagtgcaatggcatgatcttggctcactgcaacctctgcctcccaggttcaagcaattctcctgcctcagcctcccgagtagctgggattacaggcgtccaccatcatatctggctaatttttgtatttttagtagagacgggattttgcaatgttggctaggctggtctcaaattcctgacctcaggtgatctgcccaactcagcctcccaaagtgctgtgattacaggcgtgagccaccacgtgtggctggtctggggaattttaattcagcaacacgactgtgctctatgtgccttttacattttcactctgccatcttagccttttggagctgttgcccctcatggtaacaagatggctgcagcacctccaggcaccaagcacagactacagatgttcagtaaataaatggggtatttctcccatgcctctctatttggtagaagaaaagacctttaccagagcttctttaaaaatctccccttgggctttatgtccatggccaagcctaatcactggcacagaggagggaattgctataggtagcttagatcaatcgtgattcactctctacccacatgggatggaaaaatccaaaacaaaactaaagaggaacatgatgagagcacatggggaagtgaggatgggggtgagcaggaaaggaggctactgagtaagcaaaagatagtgactgccatgcagactaagggaaaaggagatggctagatggccttgactccttattaattttctcccataaagctaattatgcaaattggggatacacacacacacacacacacacacacgtaaagaacctcaaataatcacaatgggaactaaattcacaacacaaatgactaccaagtttacttaagtgcttaacctctgttttcttgtctataaaatggggattcatccatctacccattcattcattcattcacggacattccttcatggacttctaccaaatagagacgcatgggagaaatactccatttatttactaaatatctgtagtctgtgcttgatgcctggaggtactgcagtcatgcgtgaccttctatttcttcagtgggtatatatggttgtgagtagcctctgtggacccagtaagaacaaggtgatgttcaaacccttcaaggttgctgtcttattcccatggaagagtttccttatgtgtatcttttcactaaactgctgcaagaggacacaaaaagtaacaagaaaacagtagtggccgggcgcggtggctcacgcctgtaatcccagcactttgggaggctgaggagggcggatcacgaggtcaggagatcgagaccatcctggctaacacggtgaaaccccatctctactaaaaatacaaaacaattagccaggcgtggcggcggtcgcctgtagtcccagctactcaggaggcggaggcaggagaatggcgtgaacccgggaggcggagcttgcagtgagccgagatggcgccactgcactccagcctgggagacagagcaagactctgtatcaaaaaaaaaaaaaaaataagtaaataaaataaaaaataaaaaaaagatcatcctatcagaatcacacccacttccacccacattttcgtcttgatgaggagaccaagcaactcaagtctgtcttatttctcatttgcagcacactacaggttagctgctataagtcatgggtgtcgcttgtctaatagcacttgtatctctacataggagacggtgggaaagttaatatcaaggtggcttttacgcatctgagatatattttgtgtaccagaatggttccaaagagaaccttttagttttagtgtgaactgcataatgatacacagtcaactgggcctctgtctggtgacagtcttcaaaaccaaaactaaattttccccatggaaatatgtttaggaatagaggcccacagtgatatttctactcctaagaggaaattgttcacatcagcagaatattaagttcatgttaaaaatataaattcctctactgtctttctctgtacttaattctgaccacacgcttctcactcgggaagaccaaggtaataaccagctctctaatggggtcactcaaggctacacttaccttctgctcttgaatcctagctatcagatcttggtcctttaggaagcccttttagggcttctcacctcagatctaatgcttttcacacaacatttttttttttccatctgtactgatacatactagaggacaatccaatgaaataaaaatgtatttatgtagaagtatgatgcatataatagtctatggtggaatttgagccaatttttttgagctgagcagaattcagaaaaggagaaaagatacagagaaaccataaagactggaagagtatgagcaaagaaggttgcacatgtcactagaatgggttggaggccagcaagaatatctgtatagacagcttccattcagaaaccctgcctctgtgagcttgaaattctggactccaaggtaattacctgggcttttgtttcctttttccagaggtccagattccagatgagggaagagtcgcctcaagttcaaagtaccctgttcttaatgtttcacatctctcagtgagatgtcagatgagtatacacattcaatatggcagacatagttgggaagtatagcacagtcaacaaatttgcctgcagcacatagcctgtgaactgatttggacacaaatcctttgcctctgaatttttttttttttttttttttttttttttttttgagacggagtctcgctctgtcaccaggctggagtgcagtggcatgatcttggctcactgcaaactccgcttccctggttgaagcgattctcctgcctcagcctccccagtagctgggattacaggtgcgtgccaccacgcccagctaattttttgtatttttagtagagacggggtttcaccatgttggtcagactggtctcgatctcgtgacctcgtgatccgcccgccttggcctctcaaagtgctgggattacaggcatgagccaccatgcccggccctgaattttttttttttttttttttaactcttcctactatacaaagttgtttcctgtattccaggaccaaaagaatttgaaaggagaagaagtgaagaaccaatgtctattctaataaaaagtccaaaatgcacccctcttccctcacttcctcaaaccctcatgaaatataataagaaccaacagaaaccaagctatcaacagcgtgagttatcaaactgtataaaaaacctgtgtttacatttgttgccatttcgagcctttcatacccatagttccgtaatgtaaatgttactttatcttacagaacccttgattcctggctgaaagctgctctgtgaacatgaagagtctccttttttgaccaccttccttctggtaccccagagagtaaatggttcttgtgacttagaagctgttcctctttgcccagacactcaaatgtgcctttccatgggagcagagacactgaaattgatgaaattgacactgaaatctatgcggattctgttgtttttctctagctgagaatgaatgagtaatgagtgagtgagcattcacctgctgagtatctgtgatgtctgaagcactttgataggcgctttttcctggcctcttttttagacctcacagtgaccaatgtgcttctgaacaaatcccagaggaattaaatggtttgctccagttcacttagaaagcagcaaaactgtgtgactcaaaccaggcttctcagcttctcccctcagatctaatgcctttcacacaacattttttttttcatctgtactgatacatactagaggacaatccaatgaaataaaaatgtacttatgtagaagtacgatgcatacaatagcctatggtggaatttgggccaatttttttgagctgagcagaattcagaaaaggagaaaagaaacagagaaaccattaaagactggaagagtatgagcaaaggaggttgcacatgtcactagaatgggttggaggccagcaagaacatctgtatagacagctttcattcagaagctctgcctctgtaaccttgaaattctggactccaaggtgatttcctgggtttttgtttcctttttccagagctccaaagagcacagcacattgtttgcctgagttacccattcactcgacagatagtgattgagttgcttctttatgcctagccttgtattagacacctgggatccaacagagagcaagacaggcatggtgcttgcccatgaaaattctagagagacagtaagcaagtaagcaatgactaaataagataattgattgtgctgtgaaagcaataaatagggaaatgagatagagagtaactgggagagggcgggaagacctctctgaataggtgatatttgagctaagacctgagggactaaagggagccagtcatgcaaacacagagatggcattctcagcattaggaataaccaactcactgagaagggacataatggaagctggtgtgcttggcatccagtgagcaggcaagatgtggtgtgggatgacaggaaggcaggagccagaagtggaaggtcattttaggtcatgtgaaggagtctggattttattctaagtctaattggaagcgggaaagtgacatgatctgatttacatttttagcaagatccctctggttgttagaaaatgggctgggaggcagggtgggacttagcaatcacattcagggagcagttgtggtcactcgtagaaaaaggaaatcctctagaataacctgaacaatataacaatcacacttttgataccacctttttcctgttgtcaagagagcagctgattcatgaatatcttttgttgtcttgtaatagcaatagcaatttctctttaaaaaacatatttattctgctttgcaacttgctttctaaaaagttaacatattatgagctatcttgaatttattaattattttactacatattttttgatggttgcatattattccagcatattgatatgtttttgtgaaataaactttcactgttataaatagtgctgcaatgctcaatcttaaagacaaaacttggtgaatatctttgacattttcctaagaaaaaattcccagtgatagaactgctgttttaaagaaaaactttctggaacctttcttttgatgcacatcgctaaattctgctccaagagttcttatttattcacacttttatcaactttttccaacacagaaaattatcaaattttttaaagtaaaatgctggtcccttgatagctatgaaacagtactctaattttttttgtaaatataacattgctcaaaaaataaattctattaattaaaaaaatccttgtgccacttaatttacattttctggtctagatgtttactttttccttatttgctcaggcatattttgcattaaaaaaagagaggaaaaaactaaattcagatcaaatcagaatttcttttgagttgcaaaacttcgtgaaactggaaccaagccttaaccttgacctaaatttgaatatggtacccaaggcagcatcctgtgaatgggtctgtttatcctctgaagcttccatagacatgtgcttgttttaggggaaaatttaggagaaaaggaaaaggaaatacagacaggaaaaacaaaacaaaacaaaacaccagctctcagattttacttatcctcttcaatctttcctatcaaacttacgtttccattttccttatacacaatttttttaaaaagctgggtcaattcaatacctgctgaccacttacaccatcccaggcccattgctgtgcccagggaactcaaaggtcattcaaaaactatctctgccctcaggatttcagaatgtcatgtgggagataagctaccgaagttgaaatgagtgtgatgagagcaatgttagaaagttgcaggaggcacacaggaatcatcaagagggcaggaggaactgtgaaaaccagccctccccagcagagaccaagccaggagtcagctgtggtgaggtgaagacaagtgccttgagctggtattggaaggaagggcatgaaacagccgaggggtagaagtggagaaagcagggaagaggccaggatggaatagtgaaaaacataagaccaggaagttagcaaaccatggcccacaggcagtcctctgcctgctttttacagccttccaactaagaatgatttttacaattttaagtgtaaaatgcaaaaaacaaaagactgttagcctctctgtgagcacagttactcaatttggcttttttttgcacacaaaatctaaaatgtttattatttggccctctgtagaaaaagtttgccaatccttagtgaagaattttgtgttctatgctcagactattgaattctatcctgtgggtgacaaatgccattaagcaaaggataaacatgttctgttttgcattaaaaacaaaacaaaacctctttggggacaaaatgtagaagtaaactcaaagggagaggcaggctagaaaaactagttaaaagcctacttctatagtctaggaaaggagccacaagcaaagaagggtaattattttcattagatgcttaaaaatacatacaccattttttctaatacataagtgaaaaaatcttggatttgaagaataacttcccctaatcaaggcagcccttcttgggggaggagaagagaattcttaaaaatgaccatgacccttgactctacccatagagcctaaacactattgccactacactgcagtcactggacatggtcattcttgaaaatgaagatgtccagaaattaaaactctagattgtgtcaatgtctatacagagctgatgaggaaaaactcaacaggatacaattaatagaaatggaacaaatatttaaattcttgttcaagctatagttcgacactgttccctcctcaaagaagtccctgtagggtacctcaaattgtagcacacagaaaacaacctacacttccagggcatggatttgaccctatccctgctttcctcatcaattcagactaaagaagaataggatagtgttttaagaaactaaatgacagggttgtggacactggggctaaaccacaatgaaaacggctattttctctcaagctttcctggaaagcaagagaagtatgtggtctgcatctttttaaaatggcacagtctagaccctatccttaactgcattaactgcattcttatgagacggaaagactttaagccagcaagatgcaaatttctgggtgtttcctttgctttcttttcagtctttctgattggcaaaactggtctccaaagcagaactagactgatgctggtgaggatgtcctgcctttgctccaagctcatgaggagtctagatccaggctagagttcagtgtcattagcaccggctggttcaagccatgcttcatggggcttctggaattccggcaaaaccaggtcagttggcaagagtctatccctgttcctcatgcgttcaggttgatcagcagcgactgagaagcctctcttgcctttggaaggctcataggaagtggaagtttgaggccctcctcacacaatctcacatctaacgaggcttagttctgctctggtcctcgtccaggtctcctcaccctctgtggctgctggcaggtgttaggcagctttctggtggccatttcttttgataaccatcttcctgtgtcccattgatgtccagtcactctcgtgattctctatccaccctcctgacttcttgcagagcctcatggagaagtttctcactgagccctctaagtgatacatctgtttgcatctcccttcacaggccctcagtggcctgataaagaaaatatgggaaaaacatgggggcaatgatcaactctgattttcttgtatgttgagaccttgtcccttctgtggcttggggtgtgtccttacaatccctaggtgtgtttttctatgataatgtaggtaagcaacacttccctatatgtccatgccagcctacaacctctaatccttccccctgtgtctcctaacatacaggacagaataacaaattgtattaataaataaccttaagtatcttatggttcattagggaaattggaaagattattcccgcttgttacagatttaattacgactgtgtggtgtgacaattggcattggagaaggtaaatcagaaaccatagaatggcctcatattacccatctatctaataatgttgacctcactgaaatagcctgtaatgaagacaaatgtgctgtttgtaaattttaaagtgaaaatgtaaagaaaattgatcaaacactacatattagggtaagaaaatcataaaaaatttgaactccctataaccagaattaaagaattgaagttaaccattattcttcaaaaactttagttaataaagcactgtaatagaaaaatgcaatattgtccagaaattgttctggatttctaaagaaaattgatgaaagcacaaagagagagaggtgtggcagagacataggagtggatgtgttcagagctgaaacaaatcacccccaaaatttagtagttcaaaacaacaaccacagtttatttgttcatgattctgcagtttggacaagagggaccatggcgtgagctggggtctccacaaggctctataccgctgggagttggaacacaaaagatgtctttgctcccatgtctggagtctgagctgggcttgctgggcttctctctccagtggaacagttaaactacctgaaccagagctcagggctcctggagagggaagggttcttaaggaacagagagctctattatattctattgatcaaaacaaagtacaaagtacaaggtgagattcaaggagtcaactccacctcttattgggaggagtgacttgtggatacagagataagaggatgtactggagacaacctaccacagatgcttttgtgttagagcactgacgaagaccctctcctcaaccaaactccagtcatcctcccctaagcagtcttctcaactaggcctcaaccttggcctgtaagaactgcaactttcagcataaacaattctgtgtacccctcacccatccccactaagaggcctgaacaaatactagcacagtttttgtcagctcgagcccatgcccctagggtgatgaccccaacctccataaatgcccgcttagaaagctcagcactgccaaaagaatttactctctgtttcacccagaacctgatttcaggcctctgacttccctttccttagaacattgactttagaaaacttgtaactgtaaattctttctttgtgtctctaagttgcatcttctataacccagaaatgtctttcttaagaacctaggagccattcctttgaaatttaatcatcaggaaggataggattcctgtctcccagtctttgtggatgggtaggagcctattataagcaccagttagcagacacagatggccaaatctcatggaccaatcgctttcctctcctaactttttgtaattttccactttctgtctttgctcaagttcccattggctcctcctccccactccctcagtctcagtttaaagtgactttcacctttgcacagatcagaattgagctccatctctcctccctactgcagcagtctaaataaaatatgtcttatgattttcaacaagtgtccagttaataatttttttgacactaaccttgatgaaagatgattttctcttgtaattacattgaggatatagagaagtaaacagagctgagatgtattcagaggctgatcaaaatttttagaggcgaagggaaagagaatgcatcagaagtcaaagatcaggttcaagattcaggcttgagcaactgcagagataggggtaccgttcattgagactggcaacatgaggagaagggcagatgtggggttagttcagacatgctgacttggaaaaggcttccaaatggagaggtccattataggccattgggtatatggatatgaagttttgaaaagagatgagttgcaggagagcatcttgaacccttaaacattccaggaactaattaaagccatgagtgtaatcgagaaaaactagagggagtgttcagaagaaaaacaaataaagtcttcaacatttgggggtgagaaaattaaatattgactgcaaagaaaactgagaaggagcagccagagagcaggcgagatggaattgatccacagattggctagacagagtattgctaaacttgtatcatggcatgggaatgcaaaccattgcagaaagtgaagggtgttctttctgagagcttgcagtgactctgtgaactaaggaagtttagactgctgagaatgagagcagaggaaattggatagagaaaagtagaaaaggtttgaaatatctgttataggaaatgagagcaaaaccgaaccaagttcaaggttgtattatcaagactctacatcagatggtgtaaagatggaaatgaacacagaattggctgtccaatatccaggatggacaagactaagtgttgcaaagaaagagaactaactatagcactgaaacatggagtctctccatatatcttcccccaaatagaccgatatatacacaaatatattctttattcttagagagagattatctgtctagaggttgggaaacatgtgggaaatgagaaatcctgttttttgtttttttctgttactatattaacattctccaaatcacatgattttccctgcagtgaagagcagctcaagaagtttgttcacgtttttatattcatctgtatgatgccaacataatcaatcctaagcagaagatttttctgtccccataagctgccctgctcttccccagctgctggtagggcttgggtatgtgcccagtgttcaactcctgtaacctgctcttacagagtgcagaatagatgccttaaatcaacaggacatattgtgaaacacctattacatgccaacgctctgcttccttactcctaatagctgaatgtttcagttcttaacattcagggtattaaaaaatgaacctaaaagaactgtttagatgggatttactttagctgctaattcattccagacacaaggctagaaaaatttgtgtttgaaggccacatttgacccttaacctgaatttatctgtccttggagaaaggatcaaaaactagaatactgagatagtcccaggaatgtgaaaacaccatgtcacactgaaagctgacttagccacaacatctgaagagggtgtaggagagagaagtttttgtgtggaaatcatctcccttgtgcctttgccccttctctctgtctttcttattgactgacaataaatatggaccaaatgtacactgttttagtatttagtgactagaattacatactcctttttaagagttaaaaggtggccttcaaaaattattcctcagtgtcccttaaatttttttctatagctttttttttcatacggctcataatctgtgaaagaaatgccccatttcagtaccagacaagaaagttcagatgaaacttgttaaatgatccaatttttaaaggaaaagttggcatgagctgatgtgtccagatttttttctttttttttttttctaattagcctcatggcttctttgaaaacacacagggcacaaacatgatttcaaatgatgtcagctggtagacaaatttgctttcctttttgtgttacgatatttttgtatttatctaaatcataactaaatataagtttgtctattaaatgtaaaaaatattgagggcaggccgggcacggtggctcacgcctgtaatcccagcactttgggaggccaaggcgggtagaccacgaggtcaagagatcgagaccatcctgccgaacatgatgaaaccccatctctactaaaaatacaaaaattagccaggcgtggtggtgggcacctgtagtcccagctactcgggaggctgaggcatatcctcttctgaggaggatggcgtgaacctgggaggtggagcttgcggtgagccaagatagcaccactgcactccagcctgggtaacagagagagactctgttgcaagaaaacaaaaacaaaaacaaaaacaaaaacaaaacatacatatatatttatatatatatatatatattaattggtgctgcaatgaatatatgtgtgcatgtatctttatactagaatgatttatattcctttgggtgtatacccagtaattggattgctgggtcaaatggtatttttggttctagatccttgaggaatcatcacactgtcttccacaatggttgaactaatttacattcccaccaacagtgtaaaagcgttttatatatatatatgtgtgtgtgtgtatatatatgtatatatatgtgtgtgtgtttatatatatgtgtatatatgtgtgtgtgtatatatatatgtgtatatatatgtgtgcatatatatatatgtatgtatgtatatatagagagagagggcaaagatagtgactcttagattttcatggaacacctagtatgggtccttgatcttaaagagcttcataggataaataagtattatgatctcttattttttaagcagatatattttatttagaccacttaagagtgccaccagctccacagatatggtaactttctggctagaaagtagcaagttttattttcctagaataaggctaaagaaatagctttggctgggcgcggtggctcacgcctgtaatcctagcactttgggaggctgagacgggtggatcacgaagtcaagagatcgaaaccatcatcctggccaacacggtgaaaccccgtctctactaaaaatacaaaaattagccaggcgtggtggcgggctcctgtagtcccagatactcgggaggctgaggcaggagaatcacttgaacccaggaggcagaggttgcagtgagccgagattgcaccactatgttccagcctggtgaccgagtgagactccgtctaaaaaaggaaatagctttaattctttctggcttagtcttctgctggaatggtggctagaaagataacactattaagaactgatgcttgttcagtgatggttatggaccagacactgctactagttgtcggcatgagtagtctcacttaattctcccaacaatgttatgcacctatgagaaaggtgcataataatgtccccatttttcacataaagggacagaggcacaaaggtattaaccctgtgacactgtggagccgagactgtgctgttaattggcttctggtgctgcctctgcctgctgatgagtatggcacagtcatcaccggtaaggatggccctacctacatatatataataaaatgtggaaatgtgacaatagagatatgtgctctgtgttatagcaactcagaagaggatatgcctgatgcagatgggggagagggtggtctgagaaagtttcctggatgaggaagttgctgagttgagccttaaaagactcaacaagccttgtatgaccagaagtcatgaaacacacagaggcagggaagtgcatctgaggcagagagaaacacgaaccaaagcagccaagggaaaactatgcatagtggtgcatgaagggatcaacacatttcatcaaatttaagatgcattgattgcaaaatcacatatgtaccatgaagaaggagaaaggccaccaaattaccctacgattcatcatcaaatgaagtatgcatcttcgcttcggagaaaccaaaatgtgaaaaaatgtgcaccctagactaacgaaatatggtacaaatagtttggagtaactagcaatttttttttttgagatggtgttttgcccttgttgcccaggctggagagtaatagcatgatcttggctcactgcaacctctgcctacagaattcaagcaattctcctgcttcccaagtagctgtgattacaggcacccgccaccacgcctggctaaatttttgtatttttggtaaagacaggatttcaccatgttggccaggctggtctcgaactcttgacctcaggtgatccacccacctcggcctcccaaagtgttgggattacaggcgtgagccaccgcacccggccaggaataactggcaaattaagtgaaaggaaaaacagaggaggttgttgcaaaactcagccctgtggcagtgggggagcagaaatgagaccagatttaagttgtttttgagctcagattcacaggatttggtggccgtttggtgtcttcaacttctaaatagtaaaaagcgaaagagctatacgatctcaagagaaattagagtattgaacttctaaatagttgctatttatggtaagtaatgctgggttatcttttcttttttttttttttttaaatttaattctattttaagttccaggatatatgtgcaaaacatgcaggtttgttacataggtaaacgtttgccatggtgggttgctgcacctatcaacccatcacctaggtattgagccccacatgcattagctgtttatcttgatgctctccctccctgtacgccatccccccgacaggcccggtgtgtgttgtttacctccctgtgtccatgtgttctcattgttcagctcccgcttatgagtgagaacgtgcagtgtttgcatgccagtcagaatgtcgattattaaaaagtcaagaaacagcccaggcttggtggctcactcctgtaatcccagcactttgggaggctgtggctggtagatcacctgaggttaggagttgcagaccagcttggccaacatggcgaaacctcatctctactgaaaatgtaaattagccaggcatggtggtgtgcgcgtgtagtcccagcaacttgggaggctgaggcaggagaatcacttgaacctgggaggcggaggttgccgtgagccgaggtcatgccactgcactccagcctgggtgacagagtgagactcagtctgaaaaaaaaaaaaagtcaagaaacaacagatgctggcaaggctatggagaaataggaacgcttttacactgttggtgggaagtaaattagttcaaccattgtggaagacagtgtggcgattcctcaagaatctagaaccagaaataccatttgacccagcaatccaattactgggtatacacccaaaggaatataaatcattctagtataaagatacatgcacacatatattcgttgcagcaccaacccaaatacccatcaatgatagattggataaagaaaatgtggtacatatacaccagggaatactatgcagccataaaaaggaacgagatcatgtcctttgcagggacatggatgaagctgggttttctatttatatgctcatgatataaagttgttttaaaaatatctagttagatagagaaggagataatccatttaatggaaaaaattaagttaattataacatgtggcatgtggtcataataaattttgtgaaggtagatctgataaaattaatgaagaataacagggttttggcctggaggtatagatattggagtcttcatcatggaaatggtagatggaaatatagggaatgatgatttcacccagagaaagtatgcagaccttagctacaaactgatattgacaataagaatcttcaaaatgaaaaggcaaaacatttacatttatcccaaggtgggagaatcaccgttagcacagagtctaagcaaaagatctcttagataaatacatcttgcgtttcctgaattgacattgtgagctcataacctaagttttgccaaatgaagtgtgtctggcagtgcagcacgcagactcttagtgagcgtgggcatttcaggaggtggtagaaagacggagcctgactcattaatcagtgaaagaatcaaagagctatctttagaatgaacggacagttctgaaattcagctgatttccaaggtcagtgggtcatatccacaaatatttactgagcacgcactcggtgtcaggtggactcaggtatcaagaaaagactcttggtgagattcctgcccctcccccatccaaacccaagcagcccaaatccggggcccttacatgtggacttcatcccatctgataacagcagcaatgatgtcactttggcttcttgccgaagtccttcaaaacgctcatgcacaggagccgactggaggacagtcagttgtaagcctcattgcttgccaaaaacgtgggtggcaggccaggcccgcttcctcagatcacactcagaaaactcagaaatccaagctgtcatctgacattcgactaaagagtgtttagattccatgccaggcttgtgtacttgctatgaggtctctttcccttcatgtgcagacctctgttcaggaagccgatgtgacaccagcccccgcagaaaccacagctaatgcatgctcaggaccccagtattccttttggaggggcaaggagtgttttgccaatttagataaaatacctaaagcaccaagtaccgaatcaaattgtctgatttcttctaacttaatccatgaaggggaataggctgcacaaatgcttcctaaaattgtgagtttaagaaaaaaaatttgcattttagagaaacatgacacaaagaccaggtaaacttaggctgagtttgcaaaaacaaacagccagttattgctataaaaatgattgaatctttgtatgattaaaagaaaactacagatagataggtaggtggatagaaggagggaaggatagatacatggatagatagatacatgggtggatggatagatggatgaatggacagatggatagataaacaggtacatggatggatggatggatggatggatagatacatgatagatagattgattgattatgtctagcgtggcctggcactaattactaaaatgcaagtcaataaaaacataggggaaaagtcactgagtttggcctcttgagatcactgcttcagcgtgtggcatggaaacagtcactcaatttcttgagcctgtcttgcctcatccattacatggggataagcatgtggcccttgtggagttaataatagtaccatgattattaatagtaactaaaatgctgctggatatcaggtattagattaagaatgttatataaagactctcaattggtccgtaaggcaatcctgtaagggagactattttacaaatgtccttttccaacaagaaaaatgagtcacagagaggtttcctaagttgtccagagtcacatccctggctagtggggaagtccaggtccatctctaccaaaacctatgtacattttcaccactgtgtctgagacactggacataaaaatgtttgggaaactgccaagtgaaatatatagcaaacgcatgctagtgaaatacatatccaatgcataaatatgtaaaatgcaattcattatcaactaataagcacgtctggcctgtgacttggcttaattccagggaatgccaaattctggtgcatgtttgtatataacaaattgggctggagccccagaagttgctagggaaaggactgaagtttgggtggtgtcttattctggggagctacagagatgttcatttctcatcctgctgtccttggcttcagggcaggatcccaaaaggcagatctcagcactggatggagaagaaggcagtagattcagctttcctgcatttggaactcaaaggcagtgatgtgaaccaatcatagcataggaagcaaaccacaacatgcaaaaatgccactgcaaccccaaacaggaattattagaaaggagagcaaggagcttctcactgcaaatcacagggctgcagacattaggggagagtgatggagctcactctccatacccccagccacacaaagcctcaatttcatttatttctgagttattaggttggtgcaaaagtaactggggcttttgtcattgcttttgatgacaaaaaactcaattacttttgcaccaacctaatttaagaagatcctgaaaagatacacacgtgcactttgggagagcagctatcagcacagcagcctcatagcccaggcaattcaaacgtgtacaaatgtgtgctgtgaatgcagctccactattacacctcaccacacctgtattataaacgtaatgttgctatttccattagatgttattatacattataggcctttgccgtcacatatgaataacaaatagcagaacttgaattatatgtatgtgtgtatgtgtgtgtgtgtgtatatatgtaaacattatagaaggtacctcctgaccatttaaatgcatttccctggagttagaaatgacaatgggaagctacagaattcaacacaatcaacccagttcatggctgtcctgttggagagaggcttaggtccctgttcccagttctgcagaacttacctgccccatctctacctctgctcttttttttttttttttttttttttttggtgggtgctgggggacagagttttgctcttgttgcccaggctgaagtgcagtggtgtgatctcggctcaccgcaacctccgcctcctgggttcaagtgattctcctgcctcagcctcctgagtagctgggattacaagcatgcaccaccacgccctgctaattttgtattgttggtagaatcagggtttctccatgttggtcaggctagtttcgaactcctgacttcaggtgatccacccacctcggcctcccaaagtgctgggattacaggtgtagccaccatgcccagccctctacctctgttctaagtcaccaatggaaatgtggaattttgttcacccattctttcccttctatcttgctcatcctgccctctgcttcctctaccttggttcaatctccattctgttcactcagagacatccattccagatgggcagactcgccctacatactcagcctgtttagaaaactcttcctttttctgtgcttgactgaaatgagggagcctcccatgactcctctctcagagctacgactcactctcattctgtgtatttcaggattaaaggtaagacttgcctctttcacactccttccagagtttaataaattatccaacttcaggtaaaactctctagtttctttaagattcatatcaaacagctatatcttttttgctggtcttcattctttttatttaataataatgtgatgttgaacatgtagagctcacaggtgttcaaggaactattttatctgtttttgtccctctatagttctttcccatcttctaaaagaagatgtaataggaataattataacaatcaccatcatactgattttattgtcactatattaattccccattattccaaagtaataaaaagccttagtcacattaaattaccaggcatgaataaattcgatggctgaatagagtctagtttcgattcagaaattagaccgtctggtctgatgtaacgtgcagagcctccatctttattcaaagtcacaatgaggcaccttcactcagctcccacccagcctgctgaagaaggctgcttacctgcgagaaagttcttcagagaccatcctcgctcacatctgactgcagcctgctcctctgcacatttttgcagcccctgggaatcgtcactcctcccttagctgctatcttgcaggctccgtggcccgttcagtcagcccagttggacaggacccgatgcaaccaaacaacagctctctctttggggccaccatatccagtctgtggaaaatgctagctcagctttttccctgaccaactctaggagtgcaggctgaagccagtgcaggcatccctcctttggccagttcatcagcaattagccctttagatctacaggaggaagcgagaccctagtacatgctgtgtcttctaccacagggctcacacaggaagctccccatgtagttctctggaatccacatccccttttttatgaatagggggcaagggaggactttgtgcatggctgtctttggggaaagccttggaacaaatgtctttcactacaggcaacaaccgatactgccatttattctctccatatctataaggagtttaagggccatagtttaattcttatttttgtgttgttttatatactttctgtgataatttgcactcactcagttttctcaatttggaatctgatacctaatgtcttaaggtcttgacctcttgactaagtatttcccacgtgacctcattctcacagaagagtcctgtaattctaggagataggcatttatgatgatttcccacatgaagagaaggagaatgaagcttacagagcagtaaggtggattgtccaaggtcacacaggaagtgacagagctggactttacaccctgtgtctcagactttgcagcctgggctatgactatgctgctttctattgcttcttgaatgtgttgactcttctaggtctttcttcctcagtcactgaagtctttagcacaagacttactgattttctccctctgcttcctctaccctggaagttctgtgatctcaaatggcttcaacttccctgttggccctctatcccatggtgacatcatctccccagcctcaaaggccaccaatttgactccttgtggccactcatgcttgtggccatcatgtcctgtcctcacagccctccccttcagtggctgtcacagtactgttcctcgggtaatgtctagatctccagttccttgatacttctaatgcttttgctctatcagttccctcctatgctttacctcttcccctctcgaaaccaatgtctttccaatcttgcatggccaaggttttaaaaagaattggctaatgtgctttttctactccttttagtcaattggcaaatgctctcaatggccactatagtgggatcatatttatattatactcatgtgttgcttaaaggcagggacacattctgagaaatgagtcattagatgatttcatcattgtgcaaacatcatggagtgcaattacacaaacctagttgtgtaatagcccactatacacctaggctgtatggtacagcctattgctctcaaccttcaaaccagtaccacatgcaactgtaatgaataaagtaggcaattgtaactcaacggtaagtgtgtgtatctaaacatagaaaaggtacagtaaaaaatatggtgttatatttgtgtccattgtcatatatgtggtttgtccttgaccaaaaaatcattattgcagagcttgactataattctttcttcattaatctcagctaatatatctccctcttagggaagccttccctaaaccaatacaactgggtggggcacctctgctaaatgcatccataatatgtgtactttcccccatcataacattaatcctcactagacagtacattccttcagacagggatgctgttttatgcaccaaggggtcctcttcactttatgtgggaatttgacacaaaatagaggctcatgaaatacttgttggatggataaaaggatgagcaatacgggattcaactaggccaacagaaaaaacctatcaagagacaggtagaggcaaagcttttgagaaggcagctttgtagaatagcccagatggaaagaaagatgtggaacttggccctgagtcatgactgggcatcttgcaggaagaaattgggggtgaaacattagtgagcagttgtcagggcaatttttacttcccagaggaaaaaggaaaaccaaaagaaatgcctcatgttattattcatgaaaagagcttaatggccaagtgggaacatttgctaacgaaaaactgaaaggaagagtttaaaagctaagacagcctggtgactattttagaatagcttgctaaaagtccaggacaaatgcatgccaaggaactaaaagacctggcactttaaggaaaacaacaaaagcacacatacaactcttcatggtcaattggcaaaataaaataggtttttctccttccatttttcacaaatggaaagacaagctgagtgaggaaaacaggaaggcatacactagaaattagacatgccccccaaaaaagaatttaggggagtattggtaagggactccgaggctaaaaataatagagtctttatatccataagaagggcaaggtcagctagatgctcatggaactggttaaatggatgtcatggaaaggtggaacttgcagaaactacaaacagcaacaatataacaatagaaaactttcggtgactaccagccatatgccaggcactgtaccaaggatttcacatacagtgcctcatttaatccccataatttactgttgttggtgtccttttacagatgaggacactgagtcacagagagaataagggacaaagtcacacagctggcaagtgacagatttgacaaatgaatgcaagcctgagtctagagtctgcatactctgtgccttagactttggtaacaaataaccaaacagatcagagttactggcctaattaatggaaaactcgcaagatgaaactgtcaaggcagacacagacactgcagataaagaccagatggcatccacatgaaagttcattgaaattgacaaacaggtagactgggcacgatggctcacgcctgtaatcccagcactttgggaagctgaggcgggcggatcacaaggtcaggagattgagaccatcctggctaacatgttgaaaccctgtctctactaaaaaaatacaaaaaattagctgggcgtggtggcgggcgcctgtagtcccagctgctcgggaggctgaagcagaagaatggcgtgaacccgggaggcggagcttgcagtgagccaagaagttccactgcactccagcctgggcaacagtgcaagactccctctcaaaaaaaaaaaaaaagaaaaaaaaaaagaaattgacaaacagactctgagctggagatgaacaatgtgatctatgccctgccctgactttgcttccagtccccaaacaagctcagagggaacagagcagtgagtttggatcttggaccagataaattagtaccacctataacaaagttagagtcactgagtatttaacaacatatcacctagcctagaaaaagctacatggtgtgtaaaaaagaatgcatgcctatcttatctactaaagcaaagtccattaatttctcccttcaaagggtaaaagaaaactaatgactttgatagattttgacattatttacttggcagttgagacttggccctgttccaaaaggggcttgaataaaagatgaataaaatacaagataaattaaaatagaaagccataaaagaaaggtaaggatagggacaaaaatgatgaccagaaattgggctaaactcttgtcacattgcttcacaaatttagattctaagtttagcatgtaaagcacacacacacacacgcacacatggacaaaaagaaacattgctaattatacaatttacagtttaaagagatgaaaacaaatcaattgcccgggaaaatctatttgctattgataactagcatcaggcaggaatttatatgggggattctggtgaactggaccttgtgtgatataactaaaaacttatcatccttaccatgagcacaaagaacagctcaaaaagctatttcttacgtctgttctcaatgaagatggagaatatcaaaacaaagtgttgcgttgaaaaccccatggtgggaaagactctgatgccttggatacaattctgtgtcaaaaattatcatttgttagaattagtaaagaattgtaaaatggcttaattagttgttatttgacaggccagattaggggtaagttgtcaattctttgaataaagcactcttataaacgatccagggggacgagttcagagtgaaattttggggattagtgatggtggtaagtgatctgaggtagtatatttattcatttgcttattgactgaatacttactagatactgttatactccaggtaagcatggcattaagtactggggctacatgagtctttatctccatggacattccactcttgttgataaactacaagactctttcatagagctgggcaagaaagctgaacattgtcagatgcttttaatgaaaaaaggcagggtggttgccatttgtgcgagagatgcattcctgaaaacccagcatcattcaagcctaactttttcctaggaaccaatgtaaaagtggagtgaaggagcaaatttaattttgggaccatatagtcttacaactgtggttaacatatttttgctttaagactgctttttattttctcagcaatgtctctaatgcttcccttagtgctctctaaaattaacagcacagcacgctttggtagtttgatctactgctttgtggtttatcacatctaacatgttcctaaaagtgagcgatttccaggcacaattttcagcatcagctctagcactgcgacatagtgaatatgtggatgactttgttaaagaagatatttttcaggttacactagtaacaatgtttattaaataataaattatgacaatacatattaagatatcaacataatgatgatacatattgctcaggaatactgatgcatgttaactgcaacatgcttcatgggatactgacaaaaatgatatgtatatgtatgtatatttatttccatgtaaatctatactctcttatggcaatgtcataaaaactttttacaattgagtcttccagtcagttttgaaatttttcaattctcagcaattcaaaaaataggagagctgtatactttattttggcataatgtaagatcttaaatattttgtactgtagtctttcaaatttgcctaattcaaatttaggccaaaaaaaaagtgactgccttggaatttagaatagttgcatattaatagtatagagttaaaagctgaattttagagccaggcagccttggatgtgactcctatttttaccacatatgactttggtcaagattcatatatctttatgccttagaatcaggagccaaggataaggatattgaaaaacaaaacaagggagacaggtcccaggaatgaactattgaagagttgtgtttcagccctgtagaagtctttctgtgttcttggccttgattttctgctctaaaatgctatagaatgtctttattggcatcttcttgaatcttgcctaaatcatcattacttcagcttagtagggttccagtgaggtttttctgtccctgcaaaccaagcacacaattcctcatttaggacagcatgatgttcactgccaacattcctgttgggtctacctttgcagacagaaaaatcccctaactaaataatatgtgtgcgtgttatggagggaaagagatcatcaaagagccctaaagggactcaagctaaaatagtgttgttctaaccacttcttctatgagcactctgcctgctctgtcactgtggttctagctgtcagagagctgggttctgttactgtggttccagctgtcagggagctgggtggtggttgcccagaaagaaatagcagattacaatctcagctctttttctttctcaggtctttgtaaaatgaccactcggttttcatattttaagttgaaaagactcgtacccatttatccttcccttgcgaaggaattgaaatccacaaggaaccttcatcagacttgaataactttggattagactgaagcataaaagtttaaatgttgcaatgggcaattttctaatatggtgtgttgaacatgactgtacaattgctgttagaggaaattttacaaataattgtaatctaatttatttttattttttgcttagaaaaaaacgtaaccgttgagatcagaaattctaatcatgtgttgtcaatatccgctgtcagagcctcatttttttgtccctttatagggtatgatgagacctacaaagaatagctttcgtggtttttcttaagacagtcaaccagttgatctttctgctagggtttgtttgacttgcctcagtttatgaagttaaataaagacaaattatatttttaatatgttttcaactttattaaattgctgtgtgactggaaatagttttaaagtaataaaagaattctgggccgggcgtggtggctcatgcctgtaaccccagcactttgggaggccaaggccggccaatcacttgaggtcaagagttcgagaccagcctggccaacatggtgaaacccagtctctactaaaaatacaaaaatttagccaggcgtggtggcaggcgcctgtactcccagctactcaggaggctgaggcacgagaatcccttgaactcgtgaggtggaggttatggtgagccaagatcgcatcactgcactccagcctgggtaacagagtgagattctgtctcaaaaaaaaaaaagaagaaaaaaaggaattttgatttttgatgtagcctaactcaccttaatcttattttctaataaaaatagaaattatcaataggtttctgttagtaatatgtcactggcaccaatagagatttcatgaagagtttatcttatggctaaacacccataaaattcactgttgccattttgtcatacattattttattttctacaaaaatagcctggatcttttcccaggtatggagaggatatggaagataaacatggtttccagggttctttcttactgatatttaaaagtgacttacaaatatcgattcctataggtagagttgccagattaagcaacaacaacaaaaatacagtatgcccaatgaaatttgaatttcaactaaacaatgaatacttgtttgtaatataaatgtggcccaggcaatatttgggaaatacttatgctaaaaaggtaatcactgtcttttcctgaaattaaaatttacttgggtatcttatactgcaaaccctcctgcctgtcaaagattttaagtagaaaaaattccctgattaaggtcctcaagagagtgaattcaaatttagacaggatctggcccaattaagtcatcttccatgtggagtctcatgaagtaagccatgcctgtaagcctctgtctgcatttcctcagatattatcattcagctcaccttgtgtgaggaatagacaggaagaaaggtggccacagttagcagtgcatgaaagagttcaatgcaggaattatttgaacagacttagcctgcattataaagcagatgggagaatgttgtttcctgagtattaactcaaagccagaatattctgagcctatgggatcactttattttcttcatgcctgttccaaccctcacactacaatcatacacacccccagtgtacaaaaccagttttaaaaaaaattttcagttcgacttaggaaacttctacataccacttgtttctctaggaactatggctttggcattttccacattttgtatcccatgattcacttgccaccttcaaaagatacattgcaccatgtgtttgcctatgtagtcccagcatcaaagcatctattgataacacagagacgtttaaatgaaatgagtgtgatagaattaaaagggtattccaaatctccaattcaaaatggtaactcactgctatccccataacttcttatcttttagtagagacggagtttcactatatgctggccaggctggtctcgaactcctgacctcaggtgatccacctgccttggcctcccaaagtgctgagattacaggcgtgagccactgtgcctggtcgattttatttaatttaattttattttaacatggtcaggtttcatgtcatcgcatcccctggaacctcctgaaagaaaagcagcctgtttgtctcctcggtctgccacattaaccaggatcggttttagcaagggaccggggaattaggcagctattcctttctatcctccatgctatgctatgaagaaggcagaacactgcacttttttgtcccagggtcccataagcatatttctatattcagagactctaaatcttaggaggccactgggcacaaagtgtgttaggcgtgtgccaccagtgggattttcccttgaccagctgggctaggcgtgcactctagagcatggtaggtgagcaatagctttaaatagcacttagaaagttttccaaacaaccccaaaaatatacagcaggtaaaaatcggtggcactgttgaaatctgaattgttgatccaattgactccaaatgcccctttgaattttctgagtctgatttttaagcagctctaacagctaccatcttaggaaactctgtccttagctgggttatttcctcttcccgttttcatctggaagtctttctaaaagcatttctagatacaaatgtgactctttcaaatgtagagttaatatttcattttgcttatttggcccccaagataagtaaccgcaatggtacgtgagattttctccttttactgaaactttgcattgccaaggtcgaatcaaacttttgaccccagaatcagagcaagagggcagatggtaaccagttcagtccccagtagcttatgaaaaccagcttcttcttaggaatatttttgggaggtagagcatcaaagaggaagttaactggactcctgaacaaatgagtacaatatgaagaaaacctcgagaggcatttggtgttcattagtgggcattcagtagctgctttgtcatttttcttgtttgtcataaaaaataaatacagtttaatagatgatctaacctagcaggttttggcaacaaagtagactgtgtcccattatgatcttgatgtgtataatttaaagtaagatggaacataaaaccatttccagcacacatacgggagtgagtgacatagattttgtctctgattgtccagaaatgaaaaccagtgctgtcttggatggtgtattaaatcatgtattctgttttatggagtttgggctgtaaacagcatatttcagaataattaaccctgtcatttttgacttaaaagtttgtttttaaaaataggagtgttttatgtagaaggcagaagcttaagtgccttaatagattgcatgaaggccaaaagaaattcgaagggcagttcctgttaactcacaggtcaaaattaccatcagttaggaagaattaagacatgcccagcaaacccaggggaaattctgtgcttgatgggaaagatctgggattctgaccagggcctctcgcctgcctggccagggctgcgaggtgaccggcagggcttacagaagttatgccttcagcatgacacattggataatcatctccttgtccacagagcagcatcaggaacggattaacctctgaggcaatctgggggaatcttatcagaggactgctcagattttctgcctggtaggtgaagtgtcctgatcgtagacacccccaggggattttctttgagatatatttcttgatttgttctcagatttgtagctatcacttggttttctttgttctcaaaatacagaaatactctccatgcacattaaagaagccagtggcattcctaaaactctgaaattttggaagaaatcctcatcaagagatcaggactcagagaagcctctgctctgtctcctcctctccattgcctcttgtcatacatagagaccatcttcttttctcctgtgtcttaaaaacaaatccaggcaataaatcctagctgataggacatcgtgatgtttccaaatgcaccgtattacggtttatataaataaaaagatctctggtatcttgcaagaagagatctgtctagctggccccatttcattcgtcagatcaaaagagtgggtgacatgctggatggtcaccaactaagtgacaagcttgaaaatgggttgccaacatccctcacttggggacttggttggaaaacttctaatggcactttcctttcagcttctgtgattctatcctgactacttttccacatcataacatcagttagttcgtcactcaagcccaagcatgcataaaatttatttcaacgggtatttatgaatatgaccagtatttgtcctctcacaaatggtcttttatgagatggagaaattttggggggaagtttagtaatccagcaagaaaaatcaatatttacctagaagaaaaggcataaacacaaacactgaccaaacagctacattcacccttccaaaagaaaactcagagaggaaaaaaaaaattgtaaagttcatccagggccattcccccaagttccccaggtaactgagaacatctttcatctgacctgttgactgaataaatttgattgacagaatcccagtatccttcctttgagccagcagtgagaaccctgtgtactatgaaggagagcttcatgtcagctatctgatgtctacaaagttttgaataacatttccttggcaagaaagatgatctggccctacaatttcaaaaaactaaatttcttctttctcatacaatcttaacacactgctttttaaaaatttctttaatttttaatttttaggggtacatagatacatagatgtatttatggggtacgtgagatattttaatacaggtatacaatgtgtaattagcacacttctgtgacataaatattattgttcccattttatcggtgagacatttgtggcttgagaggcaataatttgcccaaggtctcatggcctgtaaagggacatctgttaaggccaaaggtcatgcaccttcttctttccaccacaccagggaagtagctaaatagtaattcatggttcaggtaatcattttagggctagagcttcaaaataatgacactttatatcattcaagcttagaaagcattctgaatattattcagatattttaattttataatcgcaaatatcaagaatggcaatttaaaactcaattacccaaagtttggaaaaaagtgacatcaagttttagtattctttttttttttttttttttttttgagacagagtctctgcccaggctggagtgcagtggagtcacctaggctcactgcgtgcttcgcctcccaggctcacaccattctcctgcctcagcctcccgagtagctgggactacaggtgcccgccaccacgccaggctaactttttttctatttttagtagagacagggtttcaccatgttagccaggatggtctctatctcctgacctcatgatccgcctgccttggcctcccaaagtgctgggattacaggcgtgagccaccgcgcctggcccatgttttagtattctatttcattaattttacaatagtagtgatagaaactggttttgtaaaaattggaaaagaaattgaaaccatacataggattagacagttaatctttgatcacagttaatcactttgaactgttgtgtatcctttctgaatactcttatgcatagcatagggccatatgtaatgtgatgtgtgtgtgtgtgtgtgtgtgtgtgtgtgtttgtgaaagctttttagtttttcacaaatggaatcatttacatataaaatagccataccttgctcttttcactcaataatataccgtctgtgccctttctacaccagcacgtgttatccccctcaatatttgctgggggcgtaaggggtttgagggacattaattacaggaatactcacagatactaaaatccacggatgttcaaatccctgatataaaaagtcatagtattttcatataacctacccacatcctcccatatactttaaatcatttctagattatttataatatctaataaaatgtaaatgctatgttaatagctgttatactacattgtttttatttatagtatttttattattgtattgaagtttttttattccaaatattttcactctgcagctggtcgaacctgtggatgtattgcagaatctgcagatactgaggtctcactgtatatacatcaacatcgttcttttgaaaactatgcagtactgtaactgacagaatattccacctgctgattcacatacaagctagttttatttggtggtttgattgactgttttcttatgtcaaacattgctgaactcaacatatatctgccattacatgcatagaacaaattcctacacatagttggatttactgttggtgcattttgattttaatagataggaccttaattaaactccaaataatgttttaccaatagactctttccaacagtgcacaagaagatgtgtcaacccggacactggctgacagtggcatatattgacattttaaacttttactataggtattagtagatatttcacttgctgtctaatttgtacttctttaacaataagtgaagataaatatctctttaacactttttaatttttttgtgtgattattttagatctgttcattttttataaaaatttttaagcatctcagaaatatcactctgatggatttctaaattaaattaaatttgtaaattaaacccatagtctctcacatgtgttgtaaaaatattttctgattttgatttttgtattgggctttgtttacaatacttttaactgttttaattgacatgtaataaactgcacatctccagagtgtgcaatttgatagcttttgatgtataaatacacccatcacccaatcaagacaatgaacatgttcattacatttctttataattctccccctcactcctctagtattttctatcactatatattagtatgcattttctagaactttattatgaaatcatgcagaatgttctcttttctgtctagctgcttcttcagcattcttattcgatatattcatctattcactgttgatggatattaaggttgtttccattcttatgaatatttgttataagttcatgtgtggccacatgctttctttgctcttagataagtgcctaggagcagaatggttgggacgtttagtaggcttatgtttaactttttaagaagcttcaaactgatttccaaagtgactgtgccattgtaccttaccaacagcagtgtttgagggagttccagttcctgcactccttgccagaacttggtatgttcagtctttctaattttagctcttcagataggtgtttatctcattgtggtttttagttgcatttcactaatgactgatgattttaagtaccttttcatgtccttctttgctacccattcatcttcatccggtgtttgtttagatatttttttcattttcttatggggtcattttcttattattgatttctaagagtcatttatatattctggatacaagcacctagtttgtaagtattttatactagtctgtagcttgtctttttaagagaagttttagagttttataaagtccaatttattattttttctttcatagatcatgatttttttcttgtatctaagaaatctttgcataaaccaagaacacaaaatttttcttctatattttattctacaaattttataattttaggctttgcatttaaatgtgtgatctatttttagtttatttttctatatgatgcatggtatggataagtgataagatttatttatttttcaaatatcaaattgatctagcattgtttatttggagactattccttttccagtgaattgcttttgcaccattgtcaaaagtcagttgtttgtatatgtgtggaattatttctgaatttttctgtgctgttacattgacctatttgtttatcttgatggcaatactacgttgtgttgattacttagctttataatacatcttgaaatcaaatactgttagtcctccagctttttaaaaaatgttttaactattctaagttctttgcttttccatatatattttagaaaaaatttgtcaaattttaaggaaaaaactctattgaaattttgctttgaattaaattgaatctacatatctatatgtggaaaattgacatcttaacaatgttgtgtcttttgagccatgacaagatacatttttccatatacttaactctctttcatttctctcagatttcttttttagttttcagtatacaggtctctcacatcttttcccagatttatcactaagtatttcatatttttattctattgcaaatggtatcattgaaatgttgtattcttcattgttagtccatagaaatacagttgatttgtgtgtattaattttgtattttgaaaccttgacaacctcacttagtagatttagtagaccttgtgtaaatttcattgaattctctccataggtgatcattttgccagcaaatacagtttttatctgaatgcttcttctttttcttgctttacttcattgactagaacctccactataatgttgaatagaaatgatgagagcagaaatccttgtcttctttctgaccttaggggtaaaacatttagttttcaccattatgatgctagctgtaggtttttcatagatgctgtgctattcttagttttctgacagttttggccagaaattgatgttgaattttgtccgttgctttttctgcatctactgagactattgtatgtttttttctcttatagagaaaaaatgatgaattgcattaattgatttttttgaatatcattaaaccaaccttgcattttggggataaactcactaatgatgcattatacatttcatatattgctgaatttgattggctaaaataatgtttggaatttttgcatacatgtttgtgggtggtattgatctgtagctttctaatactcactccaaggaggtctggatctcagcctgtaggatagagtgtgtgtgtgtgtgtgtgtgtgtgtgtatgtgtgtttgtgtatcagaggagatgtggggagctccctccctaagcaatctttttgagttctacagggagtggatgctccttacatctgctactatattttttacctttctttttacttcttaacagccaactgtttcttactacaatgcccagaaatagttacttatttttcattataaatattaattttcagttacattgtacaacgatcagagaatgtatctgtactatatatcagcttttacaactttattgactttttgtgggggtggagggtagtcaggaatgactttgtgttcctttagaagtagcaaccaccagaatctttctttgtattaggggctaaaggatagattattatgtttagaatttttactctaaagagccaaagaataaacattttaggtttgtgggccttatagtctttattacaactactcggacatgccactgtcacaggaaaacagcccgattcaataggaaacaaattaatgtggtcgtgttccaataaaactttatttacaaaaaacaggctgctgccccctggtttaaaagacagctgtgcataagttttaagttctaaaggcagatgagaaggatgaccaagtgtcttccttcttttttatatcatgtttatttactagatatgttttctgtctcttttgaaagtacagagaagctgatagggggcacattgagaaaaagcaaacaaagcatttctgagcagacagcgctcgtttcttacaaataaaggtgccaggcaaacagtcaggctttattctctctatccattttcccactagtgaagtgactctcaggtacttcagtacggggctgaagtacgaggcctttgtactaaaactttttttttttttttgagatggagtttcactcttgttgcccaagctggagtgcaatggtgcgacctcggttcacctcagcctccacctcccaggttcaagcgattctcctgcctcagcctcccgagtagctgggattacaggcatgcgccactatgcctggctaattttgcattttttgtagagatggggtttgtccatgttggtcgggctggtctcgaactcgcgatctcaggtgatccacctgcctcggccttccaaagtgctgggattacaggcgtgagccaccgcgcccggcctgtgctaaactttttgatgttgggttagtacagtggtaaaagcataaacttggatttgaatcctggctctaaaacacattagctgtgtacccttgggtgagttttgtgatctctctgagcctatgtttgaaatatgtaaactgattataataatgccgaccttgtgtggttgctttaaagataaaaatcaataaatgagataaagtcctccacacgtaacaggaacttaaaaatatggtttcactcaccttttatatatacatccacacatacttcttttgctttcctcttttttatttttttatatttttggccaggctttcttgggagaaatctgcttgcctttactaactactgtttttaactagcggttctctctcccacctcacagcagagcagaacttgtcccaagaaagctttctgagctcctttgcctgaagcaagtgtctaaaagtcccattacaattttatttttaggatgtttactacgggcccaagatgaggtgttcaaaggcaacaggaagaaaattttaaatctctgtaaatctcacaagtgacagggtgaaattgtcttttgtgtacatttgaacatggtgaaataaaccttattttttttctttcatttcaacaatattatttccattcatatgagccttctctcaatgttttattctaatcctgaaaaggaagctcttgggttctcctgggttagactgatgtatgaatatatgtttgagtgtatatatgtacctattctattctattctattctattctattctattctattctatatatatgtttgtttctgagctcatatgagagtaagttataaacaacttaatgctttactctgaaatgcttcagcatgtatctattaaaaaacaagattcttggccaggcgcgctggctcacgcctataatcccagcactttgggaggccaaggagggcggatcacgaggtcaggagatcgagaccatcctatctagcacggtgaaaccccgtctgtactaaaaatagaaaaaaattagccgggcatggtggcgggtgcctgtagtcccagctactcgggaggctgaggcaggagaatggcttgaaccaaggaggtggagcttgtagtgagccgagatcgcgccactgtactccagcctgggcgacagagcgagactccgtctcaaaaacaaaacaaaacaaaacaaaacaacaacaaaaaaaccccccaagattcttgctgaagacaggcaagggttatcacctggagcgtgctctccaaaatgacttagcaggattcttgctgaaactggggaatggacaaggatggagcctgaaaccgaaagtcaaagcccagttaagaagaggacttagaggagcgttactaaagtttggtcagggagagagtctccatcgaaatccaccatattctccgtaaccaaactggaaaatgattcttaagaaagtaaacactggggccaggtgcggtggctcacgtctgtaatcccagcactttgggaggccgaggtgggcagatcatgaggtcaggagttcgagaccagcctggccaacatggtgaagcctcgtctctactaaaaatacaagaaatcagccaggtttggtggcgggcgcctgtaatcccagctactcgggaggctgaagcaggagaaactcttgaatccaggaggcggaggttgcagcgagcctagattgtgccattgcactccggcctgggcaacagagcaagactccctctcaagaaaaaaaagaaagaaataaagaaagaaagaaaagaaacattgttttaattcaggcagttaacattcaaagtccccgaattgtctcaaaaaaatatcctctattactttttattttcactttggaagagatcctttctaatacttagctcatgttctctgcggcacctggccagagccgcacacaattatttgcccgcaattaagaacagcactgcttcttgcttgagcctgtttggttggaattttgtggtcctagctctttatagtgaaaggtaagttaatttgacagagcataggtcagcctctggctcccaatgagctccctttgccacatatcagttagactttgtgacttctttgtgtatgtatattaagatttaccttttgccgagtacctcagcccttccctggacttgtatttcacgaatgagcgagccatcaggttgttttggtaaaaacatcaaggtgagttttttaaaggatgataacacaaaagggcatcctcagaggtaggggatcagcctggctggcttgacggtggccttcagttgttgcttttgccgaactatgaaaggaggcacagagaacgcggtgtgctgagaaaaacagcgacaaggattcctttttgttgctgtttcatcagtggtttgtggcaagcaaacatgagtaatcacttaaattggtgaggctcaaaaaggcaattgagctgacccggagtctgatttcctcagggaggccttctggggagcaaaggtcagcgacagaaacaataactgaaggctctgggcctcgcagctcactgcgcttttccattctgtacgggtgatttgccaaggtaaactcttctggatgaatgaggcctctccccagtcactttccctccagctttgactggaaaagtaatcgcagtgtaggtaatgggggccaggcccctctaaataagaagtacctacaaatccaagtccaggcatgatccgatgtggcaaatctcacaagtataatccaaatgtctgctcactcacttttcaactttggtactgtactctcacacagcttccccagttctcgtgaagcaatttcaatttcacttatttattacgaaggtttggagggttgcagggagatattacagtaagggagctccagctttgctagcttctgtctactccccctgcaaatttcccaaatttctcactgtctccccctaaaagaaaatcgtatgtcattatccaagacaacttagcctgacccaacacctacattgaaatttctgtatcgtatcaaaaaaaaaagagccagatagtagttaaaatataactttaaaaaaaaacagttttattcagaaactatttattgcaataaaggaaaagagactttcatatctaagctcaactccaaatacagcaagtaaaaactagggggtttatcgtcaaggagcaggttggatggatggaaaattgctagaaggaaacgccaagaagagaaggggaattctggctaaacagacttaacatgattcttgctgaagagcaggccagggtaatcagattatcacctggggcattctccccaaaatgacttagcaggattcttgctgaaactgggggatggacaaggatggactgtgaaacccaaagtcaaagtccagttaagaagaggacttagaggatttttactaaagtttggtcagggagacagtctccatcaaaatccaccattcactgtgcttggcaagcacaatcctccattagcttctgctggaaggtatgctttatgagggaaatcaagacaggttgtggtttctgtctgctagagcttaggatccagcaagagatcatgatttccattgcacaattaaggataacacaaagcagaaagaaatatgcactactgcttttataacttttcttcttttacatccgtcttccttttcatgccaaaccaagaaagcagaaaacctaacatcttccatgatagagttaggacctttgggttacaagaaatggaaactccaacacaaacccaagtgatttaagctggaaggggctctaaacggctctgaaagctggaaactcaaggaggttgagctagctgtaggcaccacttatttcaggggtcaggtcatgctaccagaattatattatttatctctggagttgtgtccagggccaagttctaagtggcagatcccacagcttaaggctcacatgaagtggagaagagttgattctcctattcatcaagtgaaagccttagaattgtgaattgtgggctctgattaatctgacttgttcaatgcctgcccctgaataaattaatatagtgggggtgggggatggggatataggcacaagggcaaaggatgtgctgactactctcaccaaggtcatgctctactcctgaaggtagaggagttgtcaatgggtgaaagtaggatgaaggttttttccaaagggaaattgacataaggcagagtgaacggttgctgggtgagtcagatatctgctaccttaagtagtagacaataaatcacagaggggccgggcgtggtggctcacacctgtaatcacagcactttgggaggccgaggcgggtggatcatgaggtcaggagatcgagaccatcctggctaacattgtgaaaccctgtctctactaaaaatacaaaaaattagcctggcgtggtggcgggcacctgtagtcccagctactcaggaggctgaggctggagaatggcgtgaaccaggaggtggagcttgcagtgagccgagatcaagccactgcactccagcctgggtgacagagcgagactccatctcaaaaaaaaaaaaaaaaatcacagaggaattatatcctaactatgaaaaattgagctgcccccaacaccctcaaagcagtgtaaactggggtctgtcttcctcggctgctgacaacagtttatcattctgtctctgggatggcacccatgcacctgaggcagctgatcttcaagattccaaggtgggcaccccattttcatagcagttctcctcgaaccagcccagtgctcaccacccagacaatcccgtacccctagccaagtagcagcactcacaggctttgcttccctgacacgggacagagatgattcttctccgttggggcttaacatacttgccccatttcttcacccagaatttcatcaccctgtgatgacactctgtggggtcaggttcaatgattgacagtaaaacttcttcatccacagtttttgtccccttggtttttattttgaattagtagtgggagtcattgagccaaagtcaccattgttgccgtcatctacactactagtagcattattattactcttatggccactgctgtttttattgttaagaatgatgatctggccaggtgcggtggctcacgcctgtaatcccagcactttgggagggcgaggtgggcagatcatgaggtcaggagattgagaccattctatctaacacggtgaaaccccatctctactaaaaatacaaaaaattagccgggcctgttggcaggagcctgtagtcccagctactcaggaggctgaggcaggagaatgacgtgaacctgggaggcagagcttgcagtgagccgagatcgcaccactgcactccagcccaggcgagagagcgagactctgtctcaaaaaaaaaaaaaaaaaaaattaccatctaccagaagtcaaaataggaaatacagaatgaaaacttaaacatgaatctccaatactacctaagacagaaagacaatacctttggcagacctagtcatgaaaacgcatttgcagtgggcctttgaaagggagtggctatgtcgaacgtgagtattctggttaatcaaaagctttctcctaataaattggtatcatgcttcctagagttatctctcctacatctatctagagtgaattgttcaccaggattctgacaatacttagaaaactgtctaactaggcccgaatagaaatatccttgagcttttcccatttgattttatttccgaatattgattattttgaacattgcatctctgcctgtgtttgtatcagagcttctaagaagttctgggtatttgattataagttccttgatggtgtttataatgattggctgcttaaatattttgtgaacaaaacatcgtctgggatttgcatttagataatgggggtttctatcatgccagtatctcccaaaacaatctaatgaaaacctttccctctaaatcaaatttgccagatgtttgactgtattatttaaatttagtgtggcttttgatgcataaggaagggaaccctgagaaatgtaaagttaggattattgtgtcaaatttgaaaatccctgtgctgagcagatgctgaatgttttttatctatttccataactgcatttaaaaggcattaagtgttgtgaccatggggtggtttttgcttggttttcttcatcaattttgtatgtaatataatacatttcaaacatatatttttatggtattgcatttaggaaggagaaacttattgttttacatgagactcgttgacagcatgatgccatgttaatgataatggcctttaaaaatgttccgcattcagaagcattcccatccaaagctacaccctttaaatcattctcctcacttgcaccatcactgtaggaaaacagcgcattaacctccatactattattatcactagtctcattttatcccagcacttattcagagccaacacagcccagaatgtggaatgagatggacccctgggcctcattttctgagccagattacaaaggcttccattacctgctatgttcatgctcttgtgagttacgaagtctgcagctgaaatttctaggtcaggtcttaagattggtgtcatgaagagaaacacaaaacaaagcttgaagacttcaagacttttcatggggtcaggggtgcaaataagatttttggaagtaagaatagacctagaatggttgttttcactaaagaaaaaacaaacacaagtacaagcctcctcccccagccatcatatgtgtgaaaatgaaaagaggacattagaatccaagaaatgcataggttaagatggtctgtgaataacttacaagggaaaaaaaggaagaaaaagaaaactgccagtagggaccctagattaaataactacaggaaggacatggtagatgataccagtgaggtgtcagccttcattgagagatgggcacagcaatagcaataacattcgcagcacaaggcaggtagttttgtctgcaacagccattgtggctgtcggcaatccctattgccagacatttgtgctataaatttgtgtgtataaatatgaatacatgcaactggaaggccatcattctgtggcctccatttgacagaggtctcaggcacaaggtttgggaaattagctttcagagaaataaagctttatgagaaagaaaaatgagacactagtgataaataaaacttaaactctgtgtaagatgagtggctttttatttttggttgtttaagaaacaactattatggtctgaatattcacattcccctaaagttcatatgttgaaatcctgacctccaagaagatggtattaggagatggagcctttgggaggtgattaggtcagaaggcagcgaccacatgatgggatcagtatccctataaaagagacctcagagagaccctccactccttccaccacgtgaggatgcagtgaaaagacgccctctatgagcaaggaggcagccccctacccccagacacagaagctgccagtgccttgatcctggattttcccatctccagactgtaaggtctaagtttctgttgtttaagccatcaagtctatggtattttgttatggcagcctgaacagactcagagagtgactctttattttaattgtacacatattcaagatttttcattaatttttttaaggaaggctttaacttctaagggaaagaattgacagatcgataacagaagcaggctgactattttgtgcttccctcaatggccaacataatgacatctaaggaacagaatggagtggagaagcacagttgactgtggccatggcatccccagtgtctcctgagaacactggactttcgggactttcttggactttcgtcacaagaggacgttcctttacttatgtgtaggattccatgggcgcctatttcccagcctgtgtaagtctcatcccagtaccatctcagggaagtacttcaccactttcgctgtttgccagggccctctgggagaaaggaggtcgttggtaactacagcaaatgccttggcacccctgtctctgcctccatccactagtgctctgatcagttgcagaaagtggaaagtaccctctttcccacccagtgttttttgggcacaatgggccttccctgtcaaaatgggccctttgtattttgccatcactgcctactcttttgagggttgtatgaggctattgctatcatgatgctgttgcagagagtcccagttgagcccaatcagaattgcatcggctggcacatgttcatatacaagggacttttggttttggcaaaaggaggctggtccttggatactaccagagagataagaaggaaggagaggcttagcctgagtctaaatagaatagaaagagatggcaaattaacttcaccaagttgtaatgctagaggtagagctagggtcaatgtcagacagccctttctaccagcctacattgctgcctccagaacaaaggtcaagggattgttttaccttgagtggataagacctcagattcaggcctcaataatttttgataaccatattgcaagaggaatagtaatagattctagggtcttaagaggagaggaatcaaaaaagcagaaactaggtcttctgcctaagagtcagaagatgtaataagaaagagaagaaagtgatagctttcttcaagaacttacagaaagattcaatgtcaatgtcattgtagggtttgcataaatggtagtcatatggaaaactcttagcttctgttttttaatgaagaatgttttatgtatgagtagtgagtttcatatcctgaaatacttcctaaaatctatgcaaatggatccagttaattacttttcagggatgtttaagaatttctcaaaatatggttcatgggccagcagcctccccatcacctagatcatatgagaattgcagattcccagtccccttcccagaactactggggaaaactctgggtgtggggcccagtaatctgtgtttcacaacccctcctagttcatctgattcatgctaaatgttgagacccatgattgcagtgaaataattgcatctgtatcctgccctctaaacattagtctcaccttattctatgtgctcatcacagtgcttggactatgataggtacactctcctttattgtttgatgaataactgaattcactcttgctcccaaaagtggtagcaagtttctcaaatgtggtccttaaagcacgtgtatcattttaacacagactgtttgttaaaactccaattttaggcccctccactccactacacacacaactttaggatccaaatgtctggggaagggcccagaaatgcttattttaaataattactatctttcactcttttcttcttaaaaattaacatttttatagaataattaagaaatacatccacgtggtacaacattcaagacatacagatgagggttcaacgaagagtaaatcttccggtctccctatacccatctacccaggtctcctcccacaatgcaagtacagtaagctgggggtgtttgtttatttgtttatgtatttttttcagagattttatacttaaacaagcaatcttacacacatatactacaaaaatgtatggtctttctgtccctggaattttttctctcaactacatatctggaatattcatttttgggtgtttttttgtttgtttgtttgtttgtttgtttgtttttttgacagggtcttggggtcttgctctgtcacccagtctggagtgcagtggtgcaatcatggctcactgcagcctttacctcccggactgaagtgatcttcccacctcagcctcccgagtagctggggctacaggcaggcgcaccaccacgcttggctaaattttcttttgtgtagagatggggtttcacatgtttctcaggctggtatcaaactcctgagctcaagcgatctgcctgcgtcagcctcccaaagtgctgggattacaggcatgagccatgtgcatggccgagaaatgtacattttaaacaaatttgccaagtgattcttttgcaagcagttaagaattatgtttttggattttttgacagaatgtgaaagatgtgtttctgtaagttatgtattcctcagatggttgtaggtcaaattttagtttctcctgtatctaggacttcaagttgtgaatcaacggtaactgacttaatgagctaatatttaatttatacttattcttagattcttattttgtggatatcatatgtagtaaaaccacttaggggaagagatcaggtcttttctttctgttcaaacccaatgttttgtggcacagggttggtgtcgaggaagtaactgttgagtgaacgagccagcatttggaattcatggctgaccaccaggaagactgactgattgtatgggcctattgattctgatggtatggacacctagtagactcataagtactgaaagtatggggactcatgagggagacaaaggatttctaagcctctgtcctgcttcacacacttctctctttctaggtgtgtagagcctaagacaattcagtgtagtgtggttggcagtcaagaccagtaagtcagcaaacatggctatgccttctgaaggagcttcctcgatatctgggcaggttacttgtaataaaggagatgcagcagccaaacaaacaaaaaccaaaaccacccttcattcagccagtacctcagggaagagaccagttccacctcctacgagacttcttggaagtttcacagctctccatctttcagacgaaagattcaaataagtgaaatgtctcatatttcttaatgtatgcagattatcattcctactcattcagcaaggcaaatcaaatggaggttataaaaaagaatatttttttctgatactttaccctctctaaaatacaaagattgaatttaaaaaaccctcagtgaaacctgagagtatcaaccaggccctcccagctcctttaaagacaagaactaaatttgggttattaaagaataaaacttcaagttgtagtgtaaagacaagggactgttaggcatagaattaaagggccatggaactgtcagagaactgaatcaaaggatgccttttccaagttatcccttttgctaggcattctggaagaggtctgcgcctggggtagcccagttaggtcttggaggagggaaccaagagtacaccaagcaggtaccacattcttttgctgctgtctggtttactggtttacaggtcatcctatctattccagtgcctccacctgcaggaatgcattaatgataaaatgcagagagcaatccccactggtaggatgacccaggagttttaataacaacgtgaacattaaaaaacttgggagaatgaaaccaattttaacataatagaaatcaagtttgtgagagtaggagttgaaattgtattgtattaaagtgctttcttttgaaaaagaaatctccaaaaactttccatggatgatttctagtcctccacaaggtctttgttatagaaaagtttctgctttcatccgtgattgattcccagagtttcacctctgtgcctcaaattaatgtctgaccttcagtacaattcaattcaatagatatttaatcatcacctagtgcagccaagacactatggcaagcaccttgaagatccataaaggagcaaggcaagagacataaaatatcagagaagaaacgggttttagaaaacattcatgaattccttgaaataaatattgaatcactactatgtgccaaccctagtatctccctagaaaaccaatgacatagcattaagccaagacaggcaagatctcttgttgccctgacccaggggtgcatcctggagttattctgatccggtcactcttcatacaatcatgggaatacaggtaattctgatgtatgcgctagcttagaaccagaggtacagcaccattttaccgttattaagttgagaaaactagggatcagaaataagttgtgatgtcctcaaggactatgtattatttaatgccaagtcacagtaagaccttgaatttcataccacaccatgccatggcctggttacaagtcatggacacaggtgaccataaaaatagatcaaacctgatgagggctctagaaaaggtccagagtacatcaggacatagatagaaaccactgctagagtagtaatgaaagatgccagttgaaaggactttgagaaaagttttgaaggatgataagccccaggcatggatggggaatggctggtggggagaaggaattctaaaaagagggaagaaagggatgccaaggaagaacaagacaggttataagaaaactaagtagctcaattaggtagaacaatgttccaaagtgtgaaataagaaaactttaggtggtgtccaaagagagcattaagtaatctggattgacagagtgaggaagcttggcgagtcaggaaggtgtttcatgtagtctaggcatataaacttttctttgaaaaattttaatttatggaaaataggttagagaaaaatattaggtaaatagagatggtatgcaactatgacaaaaattaagtatgaaagagattgggaaaggaatagcagatgagattaaaagatagtctgtgtactgaataatgcactgagtttgggctttgattggtaatcagaagtgaattctaaggatgttttaaagaattgccacaagcagctatggtttaggaaaatgactttggatgcagaatagagtacaaatagaagacataggcagtagaaaggccaagatgaccattgagtctacagtcatggaagaagtaacaagcatgtggactagaatactgacaacagagacaacagaaatgtaaaagggtgtgtataagaaaaacatcagtgagtaggaaaccatatgaccttcatcaaaatgaaaaactcttctgcttcaaagagcaccatcaaaaaagtgaaacttacagaataggaaaaagctttgtaaatcatacatctgataaaggacatacctaaaatatataataaagtcttacaactcaacaataaggagacaagtaacctgattaaaattagacaaaggacccaggcacagtggctcatgcctgcaatcccagcactttgggaggctgaggcagatggatcctttgaggtcaggagttcgagaccagcctggccaacatggcaaaaccccatctctactaaaaatacaaaaattatcagggcatggtggtacatgcctgtaattccagctactcaggaggctgaggcatgagaatcacttgaacccgggagagggaggttgcagtgacccgagatcacaccactgcactgcagcctgggtgacagagagagattttgtctcaaaaaataataataaaagtaaaaatatagtaaaattgaacaaaggatataaataggtaggtgttcaaataaagttctgcaaatagccaacaagcacacaaaaagtgctaagtatcgtatcattagacctcagggaaatgcaaatcaaaactgcattgagatactgcttcacacccaccagaatagctggaatcaaaaagacagataataacaagtgttggtgaggatgtggagacattggaacccatataatactgctggtaggaatgcgaaatggagtggtcattttggaaacagtctggcagttcttcagatggttaaacatgcaattgctatatgacccagtgagttcattagtaggtatatacccaagggaaataaaaatacatatttattcaaatgtttgttagccaatgtttacagtagcattatttgtaatagccaaaagaggtggagataacgcaaatgtccatcaagtgactaaatgggtaaataaaatgtggcatttaatacaatggaatattatattactgtaaaaaggaatggagcaatatacgtattacaacataaatgaaccttgaaaaccttatgctaagtaaaagaagccagatacaaaagaccacagtttataagattccattttttcccttgaaggcaaatctatatagagaaaaaagtaagctagtttagctctggtaaagatgagatcatgaaggttcatagttaaagggtgtggggtttctttttgaggtgatgaaaatgtttttaaattgactggtggtggttgcatatatctgtgaatatatctttaaatcattgaaatgtaccccttacattggtggattatatgatatgtgaattatatctcaagaaaggtgttttaaaaaaataaaaacatctgatttgtggctggatttaatggaaccccccatggctaacaaatttgcaagattcaaaattcagtacagcaagtcaaagtagctctaacttagattatgcagacctttctgatccaagatgccatgagagcacatagtggcagcaaaaggttctgtggctcttgaaataatgtgtcagtctttccctccttccatccacaaagtttaaatgaaaattgtcttttcttggaacctgcatagccaaagcaagactaagcaaaaagaacaaattgggaggcatcacattacccaacttcaaactatagtataaggccatagtcaccaaaacagcatggtactggtataaaagtagggacatagaccagtggaatggaattgagaacccagaaataaagccaaatgcttacagccaactgatcttccacaaagcaaacaaaaacatcaagtggggaaaggacaccctattcaacgaacggtgctgggataattggctagccacatgtagaacaaaaaagctggatcctcatctctcactttatacaaaaatcaactcaagatggatcaaagacttaaatataagactgaaaacataaagattctagaagataacatcagaaaaacccatctagacattggctaaggcaaagacttcatgaccaagaacccaaaaacaaatgtgacaaaaacaaagataaatagatgggacttaattaaactaaaaagcttctgcacagaaaaaaaaaaaaaatcagcagagtaaacagacaaaccacagagtgtgagaaaatcttcgcaatctatacatccagaatatacaagaaattcaaacaaatcagcaagaaaaaaacaaacaacaccataaaaaaatgggctaagaacatgaacagacaattctcaaaagaagagatacaaatggccaacaaacatatttaaaaatgctcaatatcattaattatcagggaaatacaaatcaaaaccacaatgtgataccatcttactcctgcaagagtggccataaccaaaaaataaaaaaaaaaaatagatgttggcatggatatggtgaaaagggaacaattttacactgctggtgagaatgtaaactagtataaccactatggaaaccagcgtggagattccttaaagaaataaaagtagatctactgtttgatcctgcaatcccactactgtgtatctacccagaggaaaagaagtcattatatgaaaaagatacttgcacacacatgtttatagcagcacaattcgcagttgaaaaaaatatggaaccagcccaaaagcccatcaatcaacgagtggataaagaaattgtggtatatagatataccatggaatactactcagttataaaaagaaatgaaataatggcatttacagcaatgtggatggatttggagaccattactctaagtgaagtaactcaggaatgaatggaaaaccaaacatcatatgttctcacccataagtgggagctaggctatgaggatgcaaaggcataagaatgatacaatagacttcggggacttgggagaaaggatgggggggtgagggataaaagactacacatggggtacagcgtaccctgctcgggtgatgggtgcatcaaaatctcggaaatcaccactgaagaacttattcatgtaaccaagcaccacttgttctcccaaaacctattgaaacaaacaaacaaataaataaataaataagaaaattgttttcttctggtcatctgcttctcattctcactgtcagtttcccaactaggagaatggaagatccaagttcttctccctgtacccccaaaaggaaatctttgtgcatagcaactaacatatataattatctgcctaatctacaagaatgtgaactactgaagaacagaggctgcttattccctccatttttctgttcttggcatagagtcaggcacagaactgtggctcaatagctggcaattgattgaaacaaaaaaaatagatgaatagtaccccccccccaaaaaaaaagaaaatgggtgtggcatggaatgataaaaatgtggttgataattccaagtttaatagccaagcaaatgctagatttctctctctaaaaattttcaagagggattttaactctctttccacaaccaaaatagagagtagagttcttgcacagtcaatgctaagagggtgtggcaaacaccattgagtaatataagaaaaaatgggaggataagtagaatatgttagcctaccagatattttaggatcagtaattatagaaagttcaatagtgaagtagcaaaaagtagagaaatagaaagtacattctgttttgatgcaggaaaagacttaaacaacattcatttgcagtgacatctatctaaaagatgttagttctgtgttggtgcataaactgttgtggggaaattactttatacctcaagtaggttcagccaagaaaaagagaactcacaacagatattagaagagttaaaaaatcaaggggaggaatttgcaaaaggtaatctgcaatttgcaattgctagaaaccagcaccatcccctgtggttgagggggacacagagagaaggtggtgtatatctctcatacacacacacagatattattttacttatctgtattttcaaaattttctgtagttaacacgtgataagaaaatgtgataataattttaaaagactaaaattaatttagcaacagaaatggaaatggtttgtctagctaaggaactcttccttaaagcagtaagatagtcagaaaatgtatttatacatatttttaaagaattctttagctttctgtttattgtgttctgggatgaatattgacccttagaataatttcaattatgaaaggaagatttttcaacaagtaacatttctgcatgtttgtcccaaaccatatattaaatctgattgacatgctttggatttgtgtccccacccaaatctcgcatctgcttgtaatccccagtgttggaggaggggcctggtgggagctgatgttcatggggacgaatttccctcttgctgttctcttgatagtgagtgagttctcaagagatctggttgtttaaaagtgagtagcacctcccccatctttctctttctcttgctctggtcatgtaatgggccagcttcccctttgccttctgccatgattgtaagtttcctgaggcatccccagaagcagaagcctaggcaacctgcagaagtgtgagccaattaaactcttttctttataaattacccagtgtcaggtatttctttatagcagtgtgagaagtgactaatataccgattattagaagattcatttctttttgttcaggtaaaattcacataacataaaattaaccattttaaagcaagcaattcagaggtatttagtacatttgcaatgttgtgcaaccagcacttctttctttctagttctgaatcattttcatcacccccagaagagacccccatgtccattaagtaatcactccccatttttccaacccccaaactcctggaaaccactaatatgctttctatctctatgatttttatcaattctgtatgtttcatataaatggaatcataaaatatgtgagactttttgtcttgcgtcttttacttaacaaaatgtttttaaagtttatccacgttgtggcatgtatcagccctttttgtagttttgatagctgaataatcttccattgtgcagatacactgcattttatctagccgttcatctgttgatggacatttgggtggtttctacctttaagccattgtgaatcatgctgttatgaacaatcatatacaagcatttgtttgaatacctgttttcaattccttggggtatatacctaggtcatatggctactctacgtttaactgcttttgaggaactgccaagcttttccacagcagctgcagcattttacattcccaacagcaatgtgagtgagttccaactttctactttcttatcaatgctcattatatatcctttttgttatattttttactcatatttgtttttagtattttttatttcttctaaataaaacaggatacatgtgcagaacgtgcaggtttgttacaaaggtataacatggatgaagctggaagccatcatcctcagcaaactaacacagaaacagaaaaccaaacaccgtgtgttctcactcattagtaggagtggaacattgaggacacatggacacagagaggggaacaacacacaccagggcctgttggggaatagggggtgaggggagggaacttagaggacaggtcaataggtgcagcaaaccaccatggcatagacaacctaatgtgtgtgaagtagtatcttattacagtttttatttttatttcctaatgactaatgctgttgagcatctttcatgtgcttgttagcatttgtcctctttggagaaatatctttttgattcctttgcccaattttctaattggcttgttgttgttgagttttaggaattctttatatattctgaaaactagattttacctgatacataatttgcaaatactttctcccattctgtgagttgcctttttacattcttggtagtgtctctgattcaaaaaattttaaatttggtgaagttcaacttatctattttttgtttccttcacttgtgcttttggtgtcatatacaagaatcaactgccaaattaaagatcaagaaaatttacatctgttttatccttagttttatagttcactcttatgtttaggactttgatttatctaaattaatttttgtatatggtgtgaggtaggtgaaatccatggaaagggatgtttgttcaattatttaggtctttctaaattttttcagcaatgtgtggtcatttcccatgtgtaattcttgtatctccttgattaaatttattcttatgtattttattctttttaatgttactgtaaatggaattttttcttagttttctttttggattatttattaatagcatatagaaatacaactgaattttatccattagtattgtatcctaaatatttgctgaatcctacaacttagctgaattcatttactaactttaatggtttttaataataaattctttagaattttctgtgtataaaattatttatctgtgaatacagatagtctcatttcatccttctgatttgaatatcttttatttccttttcttgcctaatttttctggctagaattttaaattttaatttagaatgttaaatagcactggtgagagcaggcatccttgtcttattcttgaccttaaaaagctttcagtcttccacgattataatgggaaatgtgggtttttcataaatgtcctttatcaaatggagaaagttttctcctattctcaatcttttgagtgtttttttatcatgaaaagatgttggattttgtcaaatgcttttttttctgcattaattgagaggatcatttgttttttccctgtattctcttaatgtgatatattacattgattaactttcatatgttgaagcaccattacatcccagggataaatcccatttagttgtgatgtgcaatcattttaatagccactggatttgaaaggaataattcttaagtaattaaattaacctagtacataatatagccaccagttagattcctcatggaggggacatgtgatctaaggagaaaggttgcaggaacaggattcaaataagttacagagaaagtgtagaatttcttcttattgcattgaagaaactcagaaaagactctgcaaaggccttgaattgtcataaagaaaggccactaataaaagctttgacaggccaggagtggtggctcacgcctgtaatcccagcactttgggaggctgaggccagccgatcacctgaggtcaggagtttgagaccagcctggccaacatagtgaaacgctgtctctattaaaaatacaaaaattagccaggcatggtggtgggtgcctgtaatcccagctactctggaaactgaagtaggagaatcacttgaacctgggagcaaaactctgtctcaaaaaaaaagctctgacacgtgatgaagcttcaaaattcccagtgagcagcatggcctaagcatccatggcatggatgtcctgaacgaggtgtgtgcaactgattgtaattaatctgaaataaattggtaagtaatttctatgtctataattctctacacccttatgattcatttgtattgctgttgtctattgctgcctaacaaaccaccccaaaacttaatattaattaatagctaataataagagtaattatttgattatgtctggcagtttccacaggtcagaaatttggagagggtttagcaaagctgtttcagtccaacagtggctggaagtgagggctggagcagcaaggagccggccaagcctctctctctatttagcctgagggcttctctatgtgctttttccacatggactacctcgagcttccttacagcacagtgtcctcagaaggatgagactctagctcatagatttcatcctccaggagagtcagaaacttgcagacatgttttcaaactgccacagtttccttgcctgattgttttaataatatggtagttaattgactgaaacgtttaattccccgatactgaatgaagcatgagctttgttaatttggcctacggagctcagagcaagacagaactattcactcagcgcgcagcaaaatgcccgagaggaaatgcttaacttctcgagtcctgtatttgcaccaaagtctaaagtgagaattttacaaaatgtcactactcccaatacagatatataagacctatcttccagaaaacaatgtcccatttttctttatgtgaggtttaagaaaatatcataaaacatcataaaatcaagaccctaccgtacctgtggctgacacttatttgctattttcatttgaatgaaccatttctcctgttccacaaagcacacacaaaacagctggttagccctgaaatgaacatgacggtacaagaatggtgttctatgtgtgtgctaagggaggtctctctggataaataaaaggttgctcatttatttatgatgcaaaaaatccattgtgcattatttggctcaaagaatcatcaattatttattcagaactccctgtctccaagtacagctttttgtgtgcatgagggcatgtctgtttttattacttcaaaacgtgtaattttctttttgattgtagtagatgctctgtctcaaagcatgtggcattgatgtaacctgtatgtttgataaaggatttctagtttattataccattttcatctgaaccctcagtcaccctgtagttaaacccccaggaatcatgacagatggatataaggagttcattcattcactaggatgctcactccttttctccctctccaaacaaaattactacatcactaaaccattaattatattctggaagcaaacatcttctcaggcatcatcgacttctcctaaccctaggaagggcatagttagagcaatagcatccctcaaatgtattttatagcccttaaactctgactttcactcacattaattctagatccatcacatcacactgccagatcagacatctggtttctatggtctgtgtagaaaatgaaaatagttgaaatagagatatccatggcctactgtgtaggttctccaggggaccgtttcatcccccgaaacagacacagctgccactcttccacagcattcagcttgttaccgagggagggtacttggtgtgggacaggtattactccttttctagcaggtgctgtggactttactgatacagagtatgtgacgctctgcctcatttaaggattgagaggttggctggcaaagactggaatccaacacagctttgcgtgccactcacaaaagacgagctcttggatttcttacccagcaccttcaggtggcagcccactcctggacctctctcctggttggagggtctccaggcatggtatccgtacaggtgcaaggctcagatttcccttagaatgttccactgtggggagagtgattgactaatggcctctagctgactctcctttggatgcactggggcattcctgctggagaccatgctcttcccaagctgcttcctgcccatgatgactgagcagtgaaaggaactggagtcaggccagttctgccccatgtggagcacctctaataggaagcctctgctctggggctccccaccagagagactttcttgggattgccctgcagttcgggatgctttctacccaatattccttgcttctccatttccttttgcagatatcagacctgcatcataatctgaaggctcttctcaccttcttttgctccttctcccctttgattaaaagataaacagtcatgtcccctgatggatccctaccacttctaatttcatctgagtgtctgctttttggagaaactgagctgacatacttggtttataggttccttctttcttcttcctccattcttctcattctcctctaggttcctacccacacactatgtttgcccacatagtagctttattttctttttctttttgtttttggtggcagatcagacagagatcaagatcccattcaatctgagcctaaatcattaacaatcccaaaactagttggttgcccagtcttcattctctgtaggatacggttggtacctcatcatcaaggtgacctactcctgcctgcaccactgataggacagagggatccttctaactagaacagtgaaaatcaagttgaactttacaaaaaataagggaagcatttctacgccgctctatttgagttttacttaatcatgttttcttcatcatattaccatcaccagtgcctggcgtagtactaacgtagttgtaataattattggatgaagactccacaaaatgtctttctgctgttttcccacccatatgcctctttccacatccccactatcacctcctgatagccagtggcttcaggatgatcttaactattatgcccaaatcagagctctccccaccaaaacttattcttggttctcatataaaatccatgttaaaaccgttattcccttagtccccattatgatttcttccagaaatctgattaaattcataaagagagaaaggaatttccatggaagtcagggtgctgcctttaactagctgtagattttggataagtaagtctacttttcttgccttcagtttttctcattcgtgttaactagtttatagtgactgcaagtatttttcggagaaacaaatttggatcaacaatatatgaagggttgaaaattctctacattttctgggttgtatagctttttaaaagatgcttactaaatcagataaatcatttatattcagatggaaataaagagtgtcaaatagcattaaaaatattctgggaggattggaaagggtgattttcctgacgtcaaagtatattcacctctgtcccaccatgctcactcacacacatctctccggagttactgtcctcacctgttctggaataacagggctagagtctcaccgacacactgggcaactttgctacatcccagattagactgtaacccttttagttgttcatcaagacatataatgaatgtcctgacaaggaaagacaacaaaactgagaaataacatgtaaaggatttgaaatagatggcaaaactttggttatttatgcttaaccactccaaagttctaggaaaaatgatatctggcttaagccttcacattttctttttccatcactgggacaaggtcctggaatacacataacttggaaaaatgcaagacatctctttgatctaagccccctccccatgtgcttcaagtactgtgatataataaggctacaggcaacctggaaacactctgcaaatgtttcccagtaaacagtaaacatcccggtactgtgatgggatgtttcttccatctgagagactggaggaaaaataaagagtttatttctttcctgtccaaagtgtttggcaggatcctaatttttcaggtcttctttagttccagcatatagcaattatatgtcagaacccttcccccaaatatccccatgggacccttgcagtcacagcccccgcagcttcataacagatgacagattgtgggaagcttgtcatatccatctgatcaaaacagtaggtaaagaaagataatatcttgaagtattagccaaagatctcccctcacttttcttcaccctgtgccagttctcctgacccaggcagctagaaaatttcactctcacatcttagagcaggaatatatttcagcagctacgccaaaaggaagaagcattgagtcagctttggatccaaatttgtttttgaaactcctggcagaaacaaaggcttgtaggaaaagacttttaagtcacatgaactgaacattatagtttcaagggcatccatagctcagcaaatgttttcatgaacactgaaatgagacaggaaatgaagagttgagttatcttgctcatgaactagattttgtaggctggcaggagagcagagaattaaagaagaggacagaagttggaggctggtgctccctacccacctgatcctgagatgcggatagcataacaaccccaggggggtcaggagaagtaagccagtgccaactagatatttcttccctgcgggtcttggggaggtaaaaagcttgcttcctagtgcccagcacagtatgggagctacagtagaaatgactgtgacggatgtcttcagcactcagagtccttgcaacttaggaatggcacaggacagtggctgactatttaccctgcacccttctctactgaaaaaatatgaaaatgctaaatgagagccagacttagagaggccttttagctgggacaaggatgaaacaacaagtcagatggtcaaataactgaagaaatcatgggaataattctcatatgtaatagctcatgggaataagaattgataccagcactgactgacacaacctaggaacagatattttacctccaatatgcacacacactcacacacactcacaaatgtgcacacacaccttcttgggcacctggcaaaaaacttaggcaccatgctgtaagaattaggagaagcctaagatccacacattcaacaacttgcttattaagttctattcattattgcttctggctcctgggggacactgcagtgtacaagaaatttagtttctaccactcgggggcataggattttcatagagaaaataagattagctgtagaaaataaagtcacatttcttgctaaggtgagtttgtggcctgggattagaattcattcatttgggatctagaggtgtggaaggagtcaagagaagcaacgagaaagacattcacattttactctgttttccctgttttgggggctaatttttcccacctgatgtgcaatatgtttcccctctcttagttgggcatccatagccaacttgctagtagttcaaccttagagcaagaaagaaggaaaattgtggagagcttgataggtgacttggaataaaggtagaagccatgggattaagttagatttttcttaagccaagactcttgatcttgccacttggctaaatgcttgttttagtgtacagtttgtattggtctttccagaaggacctgtcttctggccccaatgctgctgttctaaatggccaggctccagctcctacactactagctgccccagttactacatccctgaggctgatggagtaccaacaactctgttttgatggaaaccacatgtttgtaatttgatgtcagtgtcagacagcaaggaatggagtagaagctatggctccttgttccaaagagtatttgcttgccttaggcttataaagatcagtcccacaggctgccaggattactcactcctgaactctatacgcatatcctttttgctaagacttgcaattggtcttggtgcttccagacaaagagtcagggtagtcatctcagagctgaaacagttcatgcatcatgtcacccaccccaacattttaccctactgggaaattgttcacctagaaggcattgaggataaatctgggctttgttcattatagttgtggaaaatattagtcgtgaaaccccaaagtcactccaagtgccggtggctgattataaacaaagaggagggcctgagatgggcagagctgagggccaggaccaccatctcaggcctgagctcaggaggggcataaagactcctattgtttgcacggagcctctttgatgctcactcaggaagcccccttcccaaacagtcgcctctgccagtccttggggacctggggaatacgttcgcctggcctttggtctgtgtgtttagactcatgccacaccgaatttcatccgggaggaaaagctgtttcagatgaccatgaatagcagctttcatcagctgtcactttccattacggccagcataacatggaaatgtactagaggctgttagagccctggaatgggagcagccccttctattctgaacatttattgacttcctttgtccttgtgaaaaagttaatcgggccattggcttttttcctcctctttcctggatttatctgcctttttgggtcagaaaatgggagtgccatgagccagagctgggtgggaagaagatgcctgtctagattattcctcgagcttcatctcagtggtctttcccttggagcaatcaactgtgtgcctcagcttcctcatgtggacttggcctcaaagaaacaggatacattttctgtattagaataaatggaataatgctcctttgggcaggtgttctgtgttctatctgttgttaggagttgtggtggactgacttcagtggcatttggttaaccagctccccaaaaacaaaacaaaacaaaaaactaaaaccccaaagaaccaggtcatattcatagtgtttgccaattcccatggtttaaatactcccactgtggtagttctcaggaccccagcataatatcactgaatgtggaatccatgaagttgggaagagatgcaaacaactgtctatactgagaccagtgggaatcagctgtgtcacgccattggctcacaggcttgttggttgattttacaaagctgtaataggtgtggttacagaacttcttattaacctgtattcctgaagccagcatggatagtaaaaaggtttctgatccaagtgatggaaggaagtacaggggaggggtgtggcggtgggttgtagcctgagctagatggtataatgtgctttaagctccagattaagaccaaataggtaagaagaaccattcactggccactcaagatgttgaagcaggcaatgggaacagcgctccctgtcttgatcctcaaaatccttctaaagtgagtccagattgtaaggaaaagcagaatggggaaccaaatcttatttatccagccctgttagaaatcatcagattctattatgctgggcaggcaagagagggaatctgatctggtttgactgtgtccccacccaaatcccattttgaattctcgcgtgttgtgtgagggacctggcgggaagtgattgaattattggggtgggtctttcctgtgccattctcatgatagtgaatgagtctcacaagatctgatggttttaaaaatgggaatgggagtctccctgcacaaactctctttgcctgctgccatccatgtgagatgtgactttctcctcctttcctaccaccatgattgtgagttttccccagccacggggaactgtaagtccattaaacctctttctgttgtaaattttccagtctcaggtgcatctttatcagcagcgtgaaaatgaactaatacagaatctaactacctttgggggagaaaaaaaaatgatcctcaccagttattttctatgtaagttgctttggctaaaataaacttgcatgaagccaactctactcccccaatcactgatcagagtttgtttaaggactgtttaaaggtttgtttaagaattgatgcttgattcaaaaagcaactgcataggggctgggacgatggaagtcaatggactttgaggtaatttgaggctgacagtttccaatagggtcactatacttcatgatggcaaaatgacccaatggggactctttgtgggaaaacataaatgcgaggtaaacacagaagagtttggtcgtttgccctcagtcggttctctgtgaggtatgaaaagctgctttgctgcttctttgtgaaatataaggacatccagtgcagtaacagctgggccctactctccctcctctatatccttcatcacagtacccatgtctgtctctgtttccatcccacagtaaaacctgtccagccctgaaaaaaaaataagttacaatctaggaatatagaacttgtctataaataacaacggagaatttgaaatgttatgaaagggcacagataaagagctatgggaagaagaggagatcacttgaagttatggagtgattggagaataggttatgatagacacagtgttggaattgggccttgaaagagtcacagtacgaagagcggtggagacattaggaggtgggagaatggaaaaatatcccagaaaagaggcaccagtgtattgcagtcagggaggaatgaccctcaggtagagagtaggagagaaagaaaggagtcacagaaaataacatcttaaaataataataattcagacttggcacagtggcttacacctgtaatcccaccactttaggaggctgaggcgggtggatcacctgaggtcgggagttcgagaccagcctgaccaacatggagaaacccaatctctactaaaaatacaaaattagccaggcgtggtggtgcatgcctgtaatcccagctacttgggaggctgaggcaggaaaatcgcttgaacccaggaggcggaggttgcagtgagctgagatcgtgccattgcactccagcctgggcgacaagagcgaaactccatctcaaataataataataataataattcagactggatcatgggaaaaatttaaatggtagactgagaggctggacttcacaatgtaaatagtgagctaaggaaaatgtttgaccaggcaggagactccaagaatttctggaagattattgtggtgacagtgtgaagtcaggaacaaaaaggaaacaagatcccacctcactgatacatccagataaataatccaacattgaaacttgttttctgatcaggatgccatttgtgttaaaagacggcaactgatacactatctggcatcaatgaaagggtatgagagatctcagagccagctctggaggtaacttacttctgcccggatattctgccaaggcttggatcactgccacaggtgaaaggtgattcctacctaggcctactgcacacaacagtatgaacgaggtatgaacagttaaagaaaggggagagaataggattcactcattacatttttcttttggatttctctataaaagtggagtctatagaaaatggcatcaattccattacaaagctactctcaacaagaacaaggttagaaggaaatggaatagattcatcagggttgttggacaaaataagtataaaatcatcttagcactatgcttagcatgtagtaactgctcataaatgcttcactgatatgacttgtctttgaaactctcaagtacagagtccatagtggttatgttccttcatatccaagaggcggtagagccttggctaagaatgaaggttctgaaaccatcctgtctactttgcaattaggctccatcacttgcctcctttgtaattttatgtgagcacttggctaactcatgcctcagtttccttttccataagtgatgttcacaagggacggaccacaaaatgttgttgggaatactaaggaaatcaatacattaacttagaatagtacttaaaccatcacaagaacccaatagatattagacaggactacctatcaacttctctttgctgaacgcttaccttggtctttatcagatatcatcctctggcatccagaccaaagccaacacatgttcatgcttctggaatatacctgtagtgttgtgttccctgctgcttgtcagagatgtggtcttaattaagcccatttcagtctgtgaactccctgtcagagtctttcttgggtggctttccagagtctttaagttctcctgaatggctctggatcctccccagcctgcccttttctgtccgtctcatgccaggccgagcgctgtccctggaaggatgtgaagatggagtgggaaagcacttggcaatggattgttcagcagcagcataaagccttctttcctcctggaactcgcttccctcattgtctaactgggccctttaaagtggccaggtctttttaaaaattttaactttcttagatcaccaccaacttctttaactgtttcttaagcaaaactataaaaaatgcttcattttgtgctggtgggtgctagtaagaaatgtgacgggatctactcaggtctgtgccacacactccattactacttactggcccaacaacatgaatttggatatttggaactctttccccactcctagttcatgccatttcctatttcggagctgattttattccaagatactatattttccttccttcctatatatatatatgaagtatatatatacataggaagtatatatatatataggaagtatatatatataggaagtatatatatatataggaagtatatatataggaagtatatatatataggaagtatatatatataggaagtatatatatatacttgtatatatatatgggaagtatatatgtacttgtatatatatgggaagtatatatatatacttgtatatatatatgggaagtatatatatatacttgtatatttatatgggaagtatatatatatacttgtatatatatatgggaagtatatatatatacttgtatatatatgggaagtatatatatatacttgtatatatatatgggaagtatatatatatatttgtatatatatgggaagtatatatatatacttgtatatatatatggaagtatatatatatacttgtatatatatatgggaagtgtatatatatacttgtatatatatgggaagtatatatatatacttgtatatatatatgggaagtatatatatatacttgtgtatatatatgggaagtatatacatatacttgtgtatatatatgggaagtatatacatatacttgtgtatatataggaagtatatacatagacttgtgtatatatataggaagtgtatatatatacttgtgtgtatatatatataggaagtgtatatatatacttgtgtgtatatataggaagtgtatatatatacttgtgtatatatataggaagtgtatatatatacttgtgtatatatataggaagtgtatatatatacttgtgcatatatatataggaagtgtatatatatacttgtgcatatatatataggaagtgtatatatatacttgtgcatatatatataggaagtgtatatatatacttgtgcatatatatataggaagtgtatatgtatacttgtgtatatatataggaagtgtatatgtatacttgtgtatatatataggaagtgtatatgtatacttgtgtatatatataggaagtgtatatgtatacttgtgtatatatataggaagtgtatatgtatacttgtgtatatatataggaagtgtatatgtatacttgtgtatatatataggaagtgtatatgtatacttgtgtatatatataggaagtgtatatgtatacttgtgtatatatataggaagtgtatatgtatacttgtgtatatatataggaagtgtatatatatacttgtgtatatatataggaagtgtatatatatacttgtgtatatataggaagtgtatatatatacttgtgtatatataggaagtgtatatatatacttgtgtatgtatatataggaagtgtatatatatacttgtgtatatatatatataggaagtgtatatatatacttgtgtatatataggaagtgtatatatatacttgtgcatatatatataggaagtgtatatatacatacttgtgtatatatataggaagtgtatatatatacttgtgtatatatataggaagtgtatatatatatacttgtgtatatatataggaagtgtatatatatacttgtgtatatataggaagtgtatatatatatacttgtatatatataggaagtgtatatatatacttgtatatatatataggaagtgtatatatatatatacttgtatatatatataggaagtatatatatacttgtgtatatatatatacttgtatatatatataggaagtatatatatacttgtatatatatataggaagtatatatatacttgtatatatataggaagtatatatatatacttgtatatatataggaagtatatatatatacttgtatatatataggaagtatatatatatacttcgtatatatataggaagtatatatatacttgtatatatatatacttgtatatatataggaagtatatatatatacttgtatatatatataggaagtatatatatacttgtatatatatataggaagtatatatatacttgtatatatataggaagtatatgtatatacttgtatatatataggacgtatatgtatatacttgtatatatatatataggaagtatatatatatacttgtatatatataggaagtatatatatatacttgtatacatataggaagtatatatatatacttgtatatatatatagaagtatatatatatacttgtatatatatataggaagtatatatatacttgtatatatatatggaagtatatatatatacttgtatatatatatggaagtatatatatatacttgtatatatatataggaaggaaggaaatatatgtatataactcatgagaggactttattcacttcttcgtcactcaaaacttgctatctcttgtttatcttgtgaaccaatcacctcagtccagcttcagaaatgccattcttcaattacagggaggttgagcacggcagtattttctttctgaaatttccatcagtcgaacttattattttgaagaaaataatagctaattctttttcttgttcagtctcctaaatatttttttaaagattcaatcaataaatgtaccatggttaattcacaagaaagtgggaggcaggcttgtgtatacagaaccccaaatgggaagagagtaaaatgagagctttgaggttctctttgttcccccagacacagggtttctgaagaattgacattgtttgtacgttccctctcatgccctctctgactttgtttggcagtgcctcccagcaattcacagttgtgtggactgttctgtatgacagggtctcagcaggactacagggcagccgctggaaaactgtttcagcaattgccctgctatggaggttcgaacactcttccaatttccactgccctttgaaatgctaagggaaactggatgatattctggtctggagcatgttttgtgttgacctcttatttcgcctttcaaacaaatgagcacattcagtgcttttttgcgctagtgtctgcttacaaacctaagccaatctctaggtgcctctggaggaaaatgccaagaataggattcataggtatagcaaaatagctgggaggaggaattttcaccaaattagacggagggttttcccaaatcggaagagagataggaccaaaaagagaaggagttagtagacaagagtctgaggacctcaggacccagggtcatatccaacaacaattgctcaaaaagggagaggtcggctgggcgcggtggctcacgcctgtaatcccagcacttagggaggccgaggcgggcggatcacgaggtcaggagatcgagaccatcctggctaacacggtgaaaccccatctctactaaaaatacaaaaaattagccaggcgaggtggtgggcacctgtagttccagctactcaggaggctgaggcaggagaatggcgtgaacccaggaggcggagcttgcagtgagcagagaacacgccattacactccagcctgggcgacagagtgagactccatctcaaaaaaaaaaaaaaaaaaaaaaaaaaaaaaaaaaaaaactttgggagaggtcccctcagcctgagaagccccgagaggtagactgtgtcaagaatgaccccaggggcttctagcgccaaggggcttaggtattgggtgttgggagccaagccattgcccttgggtcctcccacttcactgttgagcattattcgttgggcactaactacggttagtagatttgtggtgttcaggagtgtaattcccccgccttatatatggttttatttaaaaagaaatttttttttgagacagcatcttccctgttgcccaggctggagtgcagtgacacgatattggctcactgcaacctctgcatcccaggttcaagcaatcctcctgcctcagcctcccaaatagctaggattacaggtgtgcaccaacacacccagctaatttttatatttttattagagacggggtttcaccatgttggccagactggtctcaaactcctgacctgaagtgatccacccacctcagcctcctaaagtgctgggattacaggcatgagccaccgtaccagccgcccctgccttatatatggtttaaaaatattcttttaaaaagttctgagctgtgagagtcctccaaaaatgcatcctttgcatcaaatatgacttccctgggtcactgttgagacttctatttcctcatcttgtgctgctcagcaaaaaggatatttatctaggttccaagataattgcttcattcctctcaactccgtgctgctgcaccgtcctagaacaaccagcaccccagcacgcccaggaccctggggtaaagaaagggtgctagtgttagggaagtctctcatatgtgtactttggtgggaaagaacattgaagagagctatttctcccaagccaggacactcattaataacacccttcatttcactaacaatatgaagaaatgggctcagtttctttcttcagcatcactatggttaggttaactgaagtaagagtttagagttgaaaatcaagagcagcaataaatctttaagcaaacgaataatcagaatgtagatcaagtaactaccctggagtgagaaatgtaagtttgatatgtcggaaagcaaatgtagaaagttgaacattatgtgatttcccaaaagactggatgttgattaacagtcagccttctcctatgtgatagcttagtattaaaagtttacagaaggcaatatgggtgagctatgcaaggcgtgtttcctggaattgcagtatagcctcctgagactgtgcctaacactgcagctgccaccaggaaagagcaatatcctttacaataggcatcttttaaggtggcatgagcacaaagggtgggtagagacaaaagagagcaccagagacgcacagaagaaatcacacatctaccagggccagaatctagaatactcctattttcaatacttgtagagatagaggaagaaacacaattctataatttactcagttggacaggatgtgctcaatcttgcccatacataagtctttgccgagagaccttggtcatttgatccaatattcttgagtgatattctttggtgggtggggctatccttctggaataaaccaggagccaaagagtcagtcttgctgatcaaatcagctcccatcccacaatctagactctggtctttcccaagtccctttgggaaacactcttttcaaactgtgtcttctccgtcggttctttgccttctctcacctgacccatgccatccccctgtcagaatgaatttggcatgtagtaaattcctttgatttttgaccctcctaacagctataactacagctttatttgtactggactctggctcaatggattggatcaactctctctgtcctcataccactagtggtttgaaataatatcaggaagcacattttatgccagcccttgagctgagcccaatatgctgcacaatacaacaagcttcatttctttttcccaactctgaagtcccagtaagagcccagtgctctctgtactgggtttccaggtaagtgagaaagaaccaagcgtagagctgagcaaaagcttaaacaacctgtaggccatggaggttttggctgggaacacagtgtgccagaaaatccggcatgtagataaaagtttgattagtcagaaagtcagacaaaatgacattactcaggcaaattatagagtccacaaaggtaggtctggactggcatccagaagtcaaaaggcagggatgactgatacacagaatcattcgtgacatccaacaacttctagtgaagtactgggttctcccttctttatctcttttctaatatcaagaaaattttatcaatatgctactgaccagctggagtttgcatgcacaggaataaagtgaaaagtcaatggtttcttgtaggagggcactctctaggatctctttatttcaaaacagttgatagaataagaaaggcccaaggagtttcttctcgtgtaccttgaaggtcaagaaaatcaagacgtgaccattggaatacaagactaaggtgatggattgagactttgtccaggtcttaaggaagctggaatagttaagtccaaaaaaatctttgaattccaagattaaattaaattaaaatgtagaaaaattaaccggttttccgcattgcatttgacatttcattgacagtcctgagcatttgtttatgcccctggccactcatattgaattcttggattttggcttagagggtgggaaaggatcaaattgctcagctgtctttaaaatcccaagttgctaaaaaaaaactttaaaagttaatgcatctcttatttttcatgaaaaggatagtgtaagttgtggatataatcaggattgaaacaacacatttttaggggaaataattaacatcactgatttcttctgcatatctttttcattcctttcaaatatgatttgcttgaagcaaaggcaacaacaacaacaaaacaaaaccaaaaaccccaatgatttgccaaattctttaatatcactctgctttcccttttacagtcctttggagtgctacaacgcatggcccgaaggcacgaggagaaggaaacgacttgctggccaggtttgaaatggaagtagaaatctcagaacacttcataaatctaggagggctccctcatgccttttggcaaaccactggcctctgatctgtgggtcaggaagatttgcacctttcctctaaggatctccgacataaaacataacccattgtgcaaccagaaggtccctgaaggtcagctggctccaactttcactgctctcctgaaaggaggccaatgtgttcatccgttctttttatttttaggttgtaaaatagagacgcagaatcacaaaaagcttttgacaatgacagtcattaacttccacctgaaaatgtgattggaacctgtgacccttctttgcttcaaaggctacagctcagcctacagaaactgcatttattgccaagagcatgatgacaaaatcacttttcttaattgctcttgaatgtaatgaagtggaaaacagaaggcaggtcttctgattcctagcctcatcagtagcaaatgaatcaagcattgcattcctggatatcatgggttttaactagtgataggtgtcggatttattggggcagatggctatgatataggatgctggtgtgtgaaagttcccctggagttggagggctgtgtacccagtggggcaacccagtgctgtggaacagatgtatttcctgccttggttacttcacttgggttctgaaactaaagaggtccccgatgacaaattcttccaacacttttaaaaccacatttcccaggaaggtctttcggaggtgaagtaaaagttaacgggaagcacagtgaggggcctggggtcaggttgcatttgggaagtttgttatgattcacacaacgttgcagatgctgcagacgtatctgctgtgccatgacacggtaaatgcagagggaagcaggattgctgattttttcacgtggcatttctctggagtagaggcagaatgcagtccagcccacccaagaaaggctgtgttggtggcaaaagatgcctcccaaacctcatcaagagggtagctgcttgggagtcttaattgatattaattatcaatgatagctattatttgccaagtatctacaatatagtaaagcactactctgacacacataactttattgaatctttacagttctataaattgaatgcctttagtgcccccattttataaatagaaatgaagcaaactaaaaacaccataagtcagctctttaatatttagggaacccagctaacttatgggtatctatctctatgtcagttccacaactgggcccctgaaatgtgatcaagttaaaagctctgtaaaaagagttagccatcatttgagattccagcgatcttgtccattttcctttccagtttttttccctccattctgtccctttatattccctgagctctagtgcagggatggcaaactggctttatggcatcaaccagcttccatcaattggcaatgttttccctaagcatgaggctggggagaattctctggagaaattggagctaactatatcagagtactatgattgattaatgatgtcttctatgatcaacttttgatgccttctatgatcaattaatgacgacttctgtgattgatttatgaagtcttctatgattgattaatgatgccttctgtgatccattaatgacgtcttctgtgggcatgggagggagcataaagggaaggtaaaccaggttatagccattcccagagtagggactttgtacttctgttggtcttcaatagtgacctgaaacaagaaattaatttattaatgtcatggggaggatggaagtgagtggcagggagcaggggaggccgcacatatgtatgtgaaactgtctttgcaaaattatgacactgagagaagtctggcatgggtgactccatcttgcttccagcctcacagcctggctgttctcgctcattcctgggcataggtcaagctaaccatggaagaaatttagtttatcatttaactttaaaacaaggataatagtaatacctccctaaaactgatctcctccttgcctggggacagaaactgcctttgtaagactagtgaagggccacaagatgaggattatgggagggtcctgaattctgctaaaatgtatgtgtagctaaatgatagccagtcattgtcccctagcttgcttctctataatcccttgcttctcaagagtcatgtggctggaggtcacaagatttgtgacttccccaattgctcctatagataacatcactactgttgctattgtaaaacctaagattgggcttttgagatgttttttcagacttttgctgacagactccacctagactcagggctcccaagtcaactggttctgtggtccccacccagaggtggacttagtgcatgaggaacattttccatatccctatgatttaattcccaacgaataagcagcacccgttcccagcctcctgtccaccaaattatccgtgaaaaacctcacctctgagttctcagggagactaatttgaatatcaactccagtccttctacttggctcgctctgtgttaactaaactctttctcaactgcagcactgtggtctcagtgaattggttttgtcagtgcagcaggctggaagaacccatgggcaactacatatggacactgacaagagtagcagcacagcaagagacttggggtggggatatctaagttctgagcttttctctcccaaggtgcatcaggttttagccacaaatagcatagtgaaaggaagagtgggcctatagcaggaagcatcagctctggaataggatgagatagtggtgtaccaacagggatatgagaaaaagcgaagaatagcaacaaacacttcaggggtgtgtgtgtgtgtgtgagtgtgtctgtgtgtatttgctgttttcctgtgaacagttctagctggggcagaatgaggaatggttgtagcctgagcaggctggagaagagaaaagaaaggaggaaagaaaataaagtggagttgagtaagcaagggagatgtgtggtgagtgtgagaagaaagaagtcttatgcaacaaggtcttccaggcaagagtcacatggagattagatctgataaaagcagaccaggaaaaaacaatatgatggcaatttttcttaggaactggtaagtcaaaacaaaaagtcatattcctatagtttgcctattcggaagcaaggaatttgatgataacttcagatcagcaaagaaagtattcttattcctcaagaggatacacaaaagaatgcaccaagagaaagcaggttaagagtgttagaaaatcaagttattccacctaataagataaaagtaaaggcctgttttaagtaggaattaaaagtcaccttggattggttaaagacacctttctatgaatgattactaatcttagcaaaggcagcagattagtctgggctttttattgtcaaaacatagataaagttactggatgactcagtgtttgcatgtcagaagtgggccatgatgaaagggagtcacaagcagatgtaaatttggaggtgaagaatttctttagatgcatagattacagagccaaagagaaccttagtgagctcctactcagtcccctcattctccaagtgagggaacatatggcagacagactctaagatgggccctagtgatccccacctactgatgtacatgcctttgtgtaatcccctgcccccattccttccacccctggagtctgggaaagacttacttctaaccaatagaatatgtctaaagtcatgggatgacattctcataattatgttgcatgacatcagactctatcttgctaggggacacactctggaggctctctttgctggcttgaaacaagtaggcatgttgaagaaacccacatggtaaggcataataggtggcctctaggactgcacgtagcccctagttgctgaaagcagcctctaaaagctaaagtagatttcagctgacagttagtaagaactaggtcttcagttgtaaaacctcaagaaaatgaatcctgccaataccttgaatgagcttggaagcagattcttccccagacaagactttggatgatagtacaggctgattaaatgcaactttgtgaaactcttatcaaaatattgtatctgatctcctgatccaccgaaactgagagataataaatatgtgaccatttgttctgcagtaatagataacataaacacgaaacccaggtaggagtcataatttgtctatggtctatttagtataactcagtgaatatttatttaatgccctctggatttatggtactgctgtggattatattgtgtctcctaaaaagatatgttaaaatcctaactccaggtaagtgtgaatgtgaatttatgtggatgtaagtgtttgaagatgtaatcaagttaagctaaagtcacactggattggggtgagccctaaatctaatgcctggtgtttttataagggaagaagacttagagagggcaggcacacacagaagacagccatgtgaagacagaggcagaaattgtagcaatgcatctgtaagccagggaataccaaggattatggtaactgccagaagcataaaacagattctccctcagagcttccagaagttaccagtcttgcccacattttggtttcaggcttctggcctcctgaactgtgagagaataaagttctgttgtttttaagtcacccagtttatagcaatttattaggacagccataaaaaactaatgtaaatactctgaatagcaagctcagtgtcccacattcccaaagttcttaaatctgagttcattaagatgatgagataccaggaaagagttaggaatatgcaaggccaaatgagagcagtggagagagggagaaacgaagagagagagagagaaagagagagagaaacacatgctcgttcaaaccacaacataagattagtcctaaaaatgagcaagtagaaggtagggtttactactagaaactaagtggaaacaacagttctgtttctgtcatggaactaggggtaggcattgtgacaatccaacttttctgggaacttcccctgctatttcacagtaatgaaattcgtcctttaaaaactcacattcataaatcaacaaaggagataaaattgaataaaaagtaatcaattaatccaaaggaagagaaaaattgacatggaaacaaatatgggctaaatagaaaagaaagatcaagataaaaggtttggacctaactatatcaatgtaaatggtctaaatattgcaataaatatgcagaggttgacataattggagaaaaaagcaagacccaactatataatgcctacaagaaaaagacttcaaatataaagacaaaaataggttaaaagcaaaaaggacaataaaaaggacttattatgttaacactaatcaaaagaaagcttgaatgcctatagtaatataataccaaagtatatttctgagcaagtattaccaaggataaagaatcctttataatgaaaaagagataatatatcaagggaacatagcaattttaaacgtgtatgtacttaataatagaacttcaatatgcatgaaacaaaatgtgatagaattataagaagaaataggaaactttttggagtgttgggtacgtgaattttcttgattatggcaatggtttcatgaatgtttaaatatctgaaaatttaaaccatattctttgaatatgtactgttttaattacgtttgattgtatatcaatagagctgttaataaagtcctaggaatctgaaaaaacaaaatgaacaaaatatttaataaataaactgatgtaaatttttgctttatcagaaaacaaaaatgcttcacattttttgcttttggaccaaaggaaaattagttgtgtttgataatatggtttgggtctgtgtcccaacccaaatctcatgtcaaattgtaatcgccaatgtaggagccgtggccttgttggaagtcattggattatgggggtggttttcccgcctggggctgttctcatgatagtgagtgagtttttgtgagatccggttgtttaaaagtgtttagcaccttgcttgtctccctctttctcctgccctgtccatatgaagtgctggtttccccttttccttccaccatgattgaagctgagcacatgctgccatgcttcctgtatagtgtgcagaactgtgagccaattaaacctcttctctttataaattacccagtctcaggtattcctttatagcagtgcaagaatggactaatacagaaaattgctatctaggagtgggacattgctataaagatacctgaaaacatggaagtggctttggaactgcgtaatgggtagaggttgaaagagtgtggagggctcagaagaagacaggaagatgagggaaagtttggaacttcctagagactttctgaatggttgcaaccaaaatgctaatagtgatacaaacagtgaagtctaggctaagaaagtctcagacagagatgaggaatttattgagaactcgagcaaaagtcacttttgttatgtgttagcaaagaacctgttggcattgcgcccctgccttagggagctgtggaactttgaacttgagagtgatgatttagggtatttggtggaagaaatttctaagtagcaaagcattcaagatgtggcctggctgcttctaaaagcctatcctcatatgcataaactaataaataacctgaagctagagcttatatttaaaaggaaaacagagcataaaagcttggaaagtttgcaacttggccatgtggtagaaaagaaaaacccattttcaagggaggaattaaagccagctgcagcaatttgcataactaaaaggaagggaagtactaatagccaagacaatgggaaaaaaggccccaaaggcattttagagatctttgcagcagcctcttccatcacaggcccagaggcctgagagggaagaacgggtttatgggccagtcccagagccccactccagttccatccatggctcaaagcagcccaggtacttgagctgcttcttcagagggtgcaacccataagccctggtggttaccacatggtcttaagcctgtgggtgtgcagagtataagagttgaggcttgaaggcctccacctagatttcagaagacatatggaaaagtttggatgtccaggcagaagtctactaaaaaggtggagccttcatgtataacatctactagggcagtatgtagggtaaatgtggggttggagccctcacacagagtctccactggggcacttcctagtggagctgtaagaagagggtcaccatcctccagaccccaaaatggtagatacactgacagcttgcaccatgtgcctagaaaagctgtaggcactcaacatcagcccatgagcacagccttgggggctgaactctgcatagccacaaggggattgctgcttaaggccttgggagcccacctcttgcatcagtgcacactggatgtggagaaattgagtcaaagaagattattttgaagctttaagatttaatgactgccctactgtgttttggaatggacagggcctgtagccccctttttgggccaatttcccccttttggaaagggactatttatccaatgcctataccctcattgtgtcttggaagtaactaacttgttttttcattttacaggcttatagacagaatgactagctttgtctcagatgagactttgggcttcgtacttttaagttaatgccagaatgagttaagagtttgggggactgttgtgaagacatgactgtattttgcaatgtgagaacaacatgagatttgggaggggccaggagcagaataatatggtttgggtctatgtcttcacccaaatctcatgtcaaattggaatcctcaatgttggaggtggggcctggtgggaagtgattggatcatggggtcagatttcccccttggtgctgctttcatgatagtgagtaagttatcatgagatcttgtttaaaatgtataacacctctcccatctctctctctctcctatcctggccatgtgaagtgctggtttccccttcagcttccaccatgattgtaagttttctgaggcctccctggccataccttctgtacagcctgcagaactgtgagccagttaaacctcttctctttataaattgcctagtgtcaagtattcctttacagcagtgcaagaaaaaactaatacagttttcagaaaataaagaaatacatataagtctaaaattttgatatttttcattttaaataacataatactaactttaatattaaaatcaatgttcaccccatcagtaatattagcatcttcaagtatgatgtgctgtaaatagacataaatgaatgatagcaaccattcctatattgtaagaaatgggtgttttattaaatgaaatataaaacataagcaaaattattttttaaacagaataacagtgaagggaaaatgttcaatgtaaactatgatgtgaaaaaaggtgttacaagctctttaaatctttaccataaaacgtacatattttgttacgtaaaaagagacggaaaacctggtgtagtgatgcaatttaacagatatactttaaatgagattttctcattttaagcttaaaattttaatttattgtcattgcctataatttttctggtagttttattacagtaaatgtacatttaatacattaaacagtttccaatttaaattattagagtcaaaaagctacagaattgagaaagtgcttaaagaaatattttgaatgaaaggtcacttgacaggttttgtaagaaataattaagaactatgggcataaaatgaaaagtaaattatattttctatgagaaaaaaactgatacattatttcaagtgggaaaaatttgggatgctaaaaatatttcaaagagttaaagcacataaaagctaccattttgatgactgatgcttagaaaattattttagaggagctttgaaaggcttttttaaatattaatgatcatcagtttgggccaaaaaacttggaacttcaaatagattgcctccttaatatagcacacatgtaatttctacttcagtaaatatgagaaaacaaattgcatcaaattaaccaccactaccaacaccacacggtcttcttttagttccttttccactacagtgggaagaaaataaacaaaaatgtacaattggattaactgaaccaaaccatcaagggaaactattaattttcttgtttatgaaggatcttaatatatttgcaaaaagccctaggaagcccagatttacctttgaaaattacaacttttaatttaaggaaaggcagggaagctaaaactggttaaccaatttgattgatatataaaacacaaatagtcctagtctataaagcttggagccctgtaaagtttaactttataacatgtaagttcatttcatagtaaatatcttcatcttgtggcactgccgctaaggattattttcattatgttgagattttgcaactgtgatcatgaattgactccatgacctcaaaacattctgataaccagagcatcccagcttgattaacctagtttttatagctattaaggtgaacaacatccttggtagtatatagattatcttacattaggctttttttctctaaagcctatcagttgaaaaatcaatatattttcaacttccatattaccaccctttttcctcttccaatgaaattataaaatgtgaacataaatggtttctgcactagaattttgcagaagtgggatgtgacataaattctaaatttatcaggtcaactgtgctcatgatagtaattttttaagtaaagaaaatactctgccatgttcttacaaaggtattactgaagaaatagtcttgaacttaggcgaaattggtagtggtcagtggtcaaaatggaaataacctcctttaaaaacactgggtgctaaagaaaaaaacaaatactagtccgtgcctacaaaagacctgtacaaaccctaaagtgttctacaattgaaatgtgtcactactaggattcaccagtcggtttgatgaactgtttttacttgtttatacatttatacttgtttagagctagtaggaacctctgaaatcatttaatctactccctaatgagcaaactgagactctgagaacccccaaggatttacgtaaagtcataagatagtgtcattcatgagcaaaaccccagatcttgaggctgttaagagctgctccttgtagagtttcacagccctgcaatgaagagatctgtgagtcactttaccaagtaaccctaagctttgctttctgttagatgacttacgatgggaatgcctctgtagtcaccctcctgcccatgacttatgtctgcaaaatagagatacataactatgaaatgatgaaaccagactccatcaatcagtgctatagactgaacgcttatgtctccccaaaggttcgtatgttgaaccctaatcctcaatgtgattagatttggaggtgaggcctttgtcaggtgattagatcatgagggtggggatcttttgaataggattagcgccctcatagaagagatcccagagagtgcccttgcctgttccaccatgtgaagatacaatgagaagatgggtgcctatgaaataggaagcaggcccgcatttgacacagaacctactggcattttgatattggacttcccagccttcagaactgtgaaaaaataaatttctaatacttgtaaaccaaccagtttattgcatcctgttatggaaggccaaatggtctaagacaatggcttcaaattattcctttctacttctaatttctacttagctgttagagagctttaggatttggaaacttccagtgcatattttagcagttctctaatttcaaggtaaaataataacacgatgtaatgcaattatctcaaattatataatctctgtgcaaagagacccggaatataagaatgcctaagtacacaaacatattcatgcatagcactgtcattttagaaccaagaaagtgagtgaatataaagcttccaaacaacagctaatataaaagctgaaacacatcctagttaccatgtgccaggcattgatataagcattttacataataatttaatcctcataacaatcctttgttgtgaatgctattattaacatcccctctttacagaagagaaaactgaggcacagagagattaagtcctgttaccaaagttgcaaagctagaaataggcaaatctagaattcaaattgaaaggccatcctcttaactaataatttacattacattgattctttgtaataaatatttatattagaatataggctaagaagggcctaaaaagggtgccaggtgatttgtaagttataattccttagttatcgtgggttttggcctatgctgaccagtttcacctggcactaccagctaaaattaaacggcgtcttcaccagtcctttcaaatggagcagatggaatgatctcccaatgcaatggcttgtcatttgtttcttacacagacccatgagccaccctttgtcaaatgaatgccatcagccagatgagaatgatgagaatgaggaagaggaactggagaatctaactgaggaactaggggagtgtgggatttgagatgtactaatcaggaaggaggtgaggccaggcgtagtggctgatgcctataattccagcactttgggaggccaagatgagcagattgcttgagcccaggagttcaagaccagcctgagcaacatggtaaaactcatctctacaaaaagtacaaaaaattaccccactgtggtggcacatgcctgtagtcctagctacttggggggctgaggtggaaggataacctgagcctgggaattcaaggctacagtgagccgtgatcatgccactgcacttcagcctggacattggagtaagaccctgtataaaaaaaaaaaaaaaaaaaaagtggtaaaaagggaagaagtttcattctgcatttatggcaaatttttcttcaagaatcaagcaagcaggccgggcgcggtggctcacgcctgtaatcacagcactttgggaggccaaggtgggtggatcacctgaggtcaggagtttgagaccatcctggctgacatggttaaaccccgtctctactaaaaatacaaaaaattagctggacgtggtggcaggctcctgtaatcccagctactctggtggctgaggcaagagaattgttcaaacccaggaggcggaggttgctgtgagccaaggtagcaccactgcactccagcctgggcaatgagagcgaaactctgtctcaaaaaaaaaaaaaaaaaaaatcaagcaagcagaagtggatataggtttaatggcacctgacaccctgacactcaaataattttagggctcccttcaagaaaaaaatacaaaagtagaaatgtaggggcaaaggaccctggaaggcactcattgccagtgaagagtctgaagcttgagctttacttattttgtagcgagttgtgaatttacttgcatatggcagaggcaggagaaggcaggaggaacttttgctatctctgtgccccatgtagactgcagatttcttcacgagaacccttcaggagagacaacagctacctggggactatgaattaaatcgagaggaatcaaagatgcataagctacctttcaaattcctatgaaaaatgtggccaagttaaaagataacatgcagaaaatgtatttaaaaacgtgtaaagaaaaacttgggccacagccattggaacaattttattataactgggcttcccttggctttagaatagaccagggaggagatcactaaggcagtaaaatcaataaagagggctacagagatttttttccagtgcttgagtggattgaaatagaagactactgtccaatctcctaatctgcctgggtagataaaacaggagaggtctagcaagagatatcaggcatgtagtcaaacagatgggtttgggcggacctcctgatctggagtaactgagggaagggctggaaagtctaaaacctggctatagaggtagcagacatcactcagctgctgggcaggactgaacaattgggagcttgcttatagaaaaacaaaatgagctgagtgatcaaaatttgagtatgccttcaaggtaggcgggacctctggtacctagaatagagacagaaagtaggatggtggtttccagggactgagggaggagggaatgaagagttactgtttagtgggtctagagcttcagtttaggatgataaaatattctggaaatgaatattggtgatggttctagaacaatattgtgaatgtgcttaatgcactgaattatatacttaatggttaagatgataaattttatgttacatatattttaacaaaataaaaaaaatccttttataaaagtgaattcaaaagacatcccagaacctaagtaaaattccacaaatcaaagccatgggtttaattgtaaggacgatagaggctgggaaataaagcaacagatactgccttttctggtcacataataacctttgtgtaaattgtagactcagaaggcatttgtatgacctatcaagaggtgagaagcccggtccccatttccaaatggttataaatgttgcactgtctgtagaaagaattcaaagggtaaggtacctacctccttttgcaaaagcagggaatggtgcaggagacaggagaaaacagggcataaaaattcacagaaaatagcatatgtcaaaggaaaaccactgtgggccagatcaaagcaatgacagaagtaatgattgagtttctttatagctatattttactgttcaaggtaggagattgtctgtaaattaaagagccaaaaatgattggattaagatacccataccctcaatttagaaactgttattaaggacttttttttttttaacagaactatttcagaagccttagagctcaggaagggtgataatgtcgggacttcagggtaagtaggaagaaacacacaattcaagggcagtgaccacttctccaacattgaaaaatgtgatcaatttctattgaaaggaaagattcagtggccagctagcactgattgttattactaaaaataaactttggtcacagattcagcagcctatgagaagttagtaaagtggttgacttaaagattaccttttaagaggcagaagaaaaataattattagtaacaccttcaaacatagaatgcttccagacatatcccagttggaatgagactaacagaactgttaatcctcttcacttttttaataaatgaaaaaattaaggttcattgggattgaatgatccatgcaaattttcattatctgtggccaaatcaaaaattactcacaagattgtatacaagccatggcgtttcatcattagggcacggaaagagctggtgagtctaaagaacgtcataaaaaaagacgggatcaagaaaatgacagattagataagccattgttttctctttcatggtatgaagcaccacgtaagggtaaaagatatatataataagctgggcaccgtggctcatgcccataatcccagcactttgggagaccaaggcaggatcacctgaggtcaggagttcaagaccagcccagccaacgtagtgaaaacccatctccactaaaaaatacaaaaattagccgggcatggttgtgggcgcctgtgatcccagctactcaggaggctgaggcggggagaattgcttgaacctgggaggtggaggttgcagtgagctgagattgtgacactgcactccaggctgggtgacagagcaagactccgtttcaaatatatatatatataatatacatatatataaatgcatatatgtacacgtatatataaatgtacatatatacacacatatacatattatatatatgtatataatttgcctgtatgactgtatccctgtgctcaaaaggtaactggaatgaaatgaaggaaggttgcttatgctgatgacagagtgtcagggaacagccgactcagcacaggtttagagacctggaaaacatcaaagcggcaaccacataaataagggacacaatagtaaaaatgatgaactggaatgagagtccattaaataatgaaagcatcacacaaataaatggtaatgaacaaacagagaccagactggtgagaagcctaggagcagacgtgcagacatgatgagggaaacagactatgggcattgttacacgtgggagatttgcaacttcagttagaagacaggatggggctggtagaaacagatctacttccaatttttttctgtgtgttcattatatatagcttggactagtaaaatgcatcatctcgttgataaagaactttttattaatggcctcaccaaatagcaggggccaaagagtctgaaaaagagctcattatttatggctagatagaagaagagctaggtgtgttcaatacggaatcactttacagttggaagtcaataccagttggaatttttgcatttcagtgggtcggaaggaataagaaagctacatccacaagaaagtttcaaatgccatattcatgaatgatagtagggaggggatttttctctaaagagaactgtccctgacatggaaagaacacaatttgagaaagggcaaagaacatcaaagagggtaggatgaaggccaagcactttgaaatgaaatgaaaagaaaggtataattttgaggccagattgttataaaagggggaaaataacaattaggggtcttgttgaaaagaaaggaggaggctgggcgtggtggctcacatctgtattcccagcactttgggaagccgaggcgggcagatcatgaggtcaggagatcgagaccatcctggctaacatggtgaaaccccatctctactaaaaatacaaaaaattagctgggtgtggtggcaggcacctgtggtcccagctactcaggaggctgaggcaggagaatggtgtgaacccaggagacggagcttgcagtgagccgagggccactgcactccagcctgggtgacagagcaagactctgtctcaaaaaaaaaaaaaaaaaaaaaagaaaggaggaataaaaaaatatgtaagatagtttttgacataaggattttgatacaggaaaaaattgaagagtaaaagtttactcagatgaggaaaaaaataaaatcaagaagtgtagaaggaaagatgctgaaaagacttttgtaagtaattcagctaaggagaaatgtggggtttgtccaaggtgggaatgaactgcaatagaccatatcaactttttttttttttaatctagaaaggaaggaaaaagaaaaaataactattcaagtctaaagtctataccctctttgatataaacatgttttgaatcattctgtataaaggtaaggtattactactataggatatttagttggactttgtataatgaagaacaactgatctagaatttaggggtaagatcaagtagtctgaaataaaaattaggtttggctataaaggtatcagttgataacacttaatcaaaaactcttgttgcctctgaaaaattgcagtgaaatgactctaaagtttccttgcttcctacagttccctggttgaccagctgttgcaggcctgaaataaagaaatccgagcttagataaggctttctgggaaaacaggtgggagaaaaatgccactgcccagaccagaggcagataaccttttgggagtggaaggccacacgttgctgcccctggttcttcaggtccgtggtgaggggttggggtactggaagccaggtatgcatcctttcaacaacacctccatctcctatgtcaaacatgcctccattctttcagattcagttccatccatcctcctttggggccttttttttttttttcctaatgtaaaccctcttggggaaagttaagcctacttgactttcatctctctaggggtctatatcagatattcagactgtttttcctggagctgaagctgacagcgaatgccctaggtgggctgcagttttttccccaggaatctgaagtaggaaatggacatcctcagatatggtacatctgaagagagggaagaatcagatgccaaagatcactagtcaccggcaggatgtggcagaagccaccggaaagtgaaagaagcatggaggtagaagatgggagggggaaagactcattattcctatttgcaatgaaagcaagctccccttggggtgtgggagaacactctaggtttattacaaaatgactttaggagagacctaatggtcaacgtacagatcagacagttacagaaaagccctcttaggaataatcaaagttagcaccaagttcaaaatctagcatagtcatggatcatccaggcagagctaatggacaccagatctcatcctatctgatccttcaaaggtaactaaaatatcatacccagacatttgagagcaaaaaggactcacagcagaatgtgttccccattcagcgttcccttttatttttacagtaaaactagaggagagtaagttgttgagcatattgtaattaaaagaacacaaccaacagttggaaattaaactaaaacaattgggctatagcctgaaacatactaacattttctaatatcccacaatagaaccatatattagaagcaatttctattttcagttttacttcctcctagcgtaactaaaatttattattttatgactttgtatgtgatgtcacactgcctcataatttccccaaattcatcctttttcaagcttttaaagaaaggcctgccatctcaacattccattatgtagcaaacagatttataattttcctatccatgaacatggaagaagaacttctcctgtatattagaaactcaatgcaaatctgtttgcatgttgatgaagatatttcaaggaccacaaattctacaataacaccaatgcttcaccaacagggcttgaggttgggcttttaaaattccactctccttcaatgattacaggatacaataggagaataagtaggggtcctttttttctacaccaaggcttatattggaatgaatcccagcaacacttttgctgtgtttgagaaccatacgtttttctgttctctgagtctatcgaaattatgcacaaagttctggggtttctaggatatgaggcaataggaatttgctttcctttgctattattcagcaactcgaggctatttgtaaccatagcacatccacctgaatttaacgtttaacagaaatggagatatttacttccctccctaggcactttggttttgtcaggtgacaagaaatacagtcacggccctgttgtggaggcaaatagaaactgcaagacttgaacttgaaagagcctttagaagtgttttattggaatgttattttccacctgaagctgactgattccgtttctcacaattgcaggtatccatttgttacaagctgcttctgtatcttcattataaaaacacagtttggttgcctttagcatttttcccagcaaagcacaacagtaaacattgctctgcttattagaataaagaaagagagagagaaacagagagagagggagagaaagagaaagaaagaaagaaaaagaaagaaagaaaagaaagaaggaaagaaagaagaaagaacgaagaaagaaagaaaaagaaagaaagaaaaagaaagaaagaaaagaaagagaaagaaagaaagaaagagaaaggaggaagggagggaagaaaataatagaaaagaggttttcaagagaaaatatagaatggtgactggaagaattaccagtctagcattaattagaatctggcttttagacctgaggcacacactagctgtgactgatacacatcttaactcaggaaatgcagcatgactgacgttttggttgagatcatttttagtaatggagactgtcttgcgctttacagaatgtttggcagcatccctggcctctatccagggtgctagcagcaccctacactcctcaactcttgaggcaaccagaaatatctccagacgttgccctgggatgcaaaatcatgtttttgttgagaaccagtgccttaagccctaacgaaacttagtgaaacatctatgaggtgaaactaatgagagtagagagctgctgttgttggtatacggtgaaataatgcatttgaaagactagtttgcaatatacatataaggcattattattttatagacatatttatttattcacgtatttaagatctcttcatggggagctggggactcagcaggtctcagctggcagaatacgatgaagctgtttaggagaaatgtatcctctttcttttcaactgtaatatcaagagttacgaatttacagacacgtcaatgttttaaccccctgcataacaagttaacaaaaggattcaggtgctgaacagggctttgatccaaatgaccattgaagttgatttcagctttgaagatcctttgaaaataagaaaattagaatgggattaatatttctagaataatcaatatccattctctagaagcatattaatctccatttattgaaataaaattcatttccctagaagtgactaagttctctggagaatggatacactgcagatgtgatcttggaagcaaactgcttgaaacgaagctgtagatattttctagatattcttcttgaaagacaacactctacctctaagaaacaggaaggggattggaaggcatggctttggagcagacagctcagagaatggacgctaagatgttccaatcaaggtcaaagcctattatttggtgtagctaaatggacaaaataaatgtgaggccaacttcatgcacagcagggacgagtactatatagaggcagaaatgaatggacattcctgttagagaatactgactctaaatctttatacattttgctgggacttattacttccaacactcttaggaagtcacagaagcttgaagattttcccggtgttttccatagtcgttcatttttaaaataatatgaacaaaaatatctatgttcaaaaagggatcctttgcattcaattctgttcttttatttctttcacattaaaaaaatgaaggttgcagaatgcaattgtttctttgtgcaagccacttttgcataatgccaagcaaacacttacaaaagaatcagttgtacaaacaaaatgagctaagagaaatgatgacaagagtttaaaatgagtatcttgttgcagctagtgattcaagtagaataaaaacagtctgtggcactgggaaattgagagcatagacatgaaggaaatcaactgaaaaaaggtgacctggatttggggtttacttaacttctataaatgggatattaacagataaatccaaagatttggagcaatgacaaaatatctaacacttaaaatattttttccttcattttaatcctgtgttaagcttctcaagaaatatttacatcacctaatgcagcagctatggtaaatgtacaattgtactgcatattttaaaacaactttagtttcttttgattgacaacattaaagaagaaaaagaatattattttagagtgtctggtcgtttaaattttggcagataaagaaaacttccatgaaatagaagacatttttcctcttgggtttaaatttctaataaaatgttgctgacaggctaattataaatgttttatatatttcgtgcatatgtgttcctctctaaaccaatttaattcccattaatgctaatcttgttaatacccactcagagaggaaaggaatactgttaataaactattgatttatttgagtgatttaaatgggggatgggcagaaacagacgagagaagaggaaaagccaccattttacccacaaatgcatttcctagaatatttttccaaatattactgaacattaggttataaatggtataaataggaagtgggaggggggaataaagtgacaaaatgatagtcctccatccatgaaaaataaaaacattttaaacgaactgctaattaattctttcagagtactagctccaaagttagaagtgagatattacaaagaaaggtaggttttctctctttaaaaagaggtaaactaaaaaacaaatgagactcatacctgtaagtgctaattgaaatctgtttcttttttttttttaaagtcaattaaatcaacaaatgggtaagttacgttcctaacacatcttgtgctacccctagtgtggctggccaccttgtcctccatgcaagaatccaataattcctctccaattcaatcaagcattcatcagtcaagatttccatatctcagtgtactttaaatagccaagaggcaagactggctcttaagagaggttgtgtccaggtctcagtggttttcttggacacaactatgtaatgagactgggtgccatgaggggtagcctgggaatttagaaaacaaggggctctctttcccttttcatatcatctgaaaactacctaaccatttctaaaggtgcagatgtcttcttttccattctccctggaaaaagtgacatgaaatagggaacaagtggaagatggaattttgtccagggtccatccaacatttgacctttagatacattatttcacctcccaaagactcagttttcctttctgtaaaatggggataataatatttacctattgtgatcttatacaacagagcaagatttatttttttattttaatgatcaaaaaggtgtatttgaaagcactatgaaaactgtgacgggtacaaacatatgataatactaactgggaaataatttaagaaaaagtggcacgggaaaaagggagaaaaatataaggatagatatcaattttatcagggccttgtattttaaaaaaagagagagagatgtttaacctcaagattttctgaaaacttttaatgacaactgatgcttatactttatgactgggtatatagaacataaaataaaaactgaaaattgaaagtgtttagacgagtgaaattttccttttctgttgatccacgtgtttggtgttggttatacattaagatggggcgggagtgagaacaatctcttaacattcattgaaaaaaatactgaaacatattttcagcacaaatattaaactgtctcttctctaccgattggtaaaaaaatatattatattttgattttttttttctttttaaattatatggttatccatcccagccaaagtcgtgcccggtcatctggtagaacttgaggttgaaaggccggtagaactcgcgcagcctgcgcaccacctcgcggtcgatctcaggatgggtcctgcccttggtcttgcccaggcaatggggccggctgctgccctccgccttcttcaggcaggggaagcccttggtcttgttgaagtagaagtgcttgtccgtgatgatcctcttgaggcccaggaagtcttgcacgcggcccagctccccggccgggtcgctgatgagccgctcgccgctcacgaagagcatctggcggatggggaagtggcgcagccagtgctccaggtgcttggcgtagatgccgatctggatggcgctccacgacgtgtcgatgaggcccgctgtcctgtttttgaacgtcaagctctcgaaggtggggatgtcgggccgcttggacagcgtctgcgtgtagtccgagatggccctggtcaccgggtcccgcaccaccacgatgagcttggtgtccttggacatggccgagatgcgcgcgggggcctcccgcgtgacgaagtaactgggcgtcttctccatggtgatctgcccgtccagggttctgggcatcaggtccctgagaaacgcaaaaaggcatgtcagagatgtgcagagagagctcagtcccaggagagactgtcaagtacacgctggagccaggccgcaattccagcccccgcaaccccccacttgctagacatctgatggtgacgtcgcacaacgagccccgcacctcagattcctcgtgtattaaacggagaataataatattacccattgcatacagttttgtgatgattaaatgagttaatatacctcgacagcttagaaaactgcctggcaccgaataaatgccacgttaagtttctgtgttttattattgtttatccacaatgctgtaagaaaataactttggtcaaaatcttcaggtgaattagaatattgtcataaacacaattatactgctatgagatagtattaaaatatcctgagcccttcctgtagttttcttataaacaaagcaatcatattcaacataatgtagcatattacacaaaatacttatgtttgtaattactgagttttcctgcaacaaacaagacttattaaagaatccatcttttgcctaatgatttgaaatgccatcattatcatattctaaatatgttgattcctttctacattggcccaattataagttattatcgtgtgatagtatactttcatgtacaccaaagtaaattctgactttctgttgttcaacatgtccttgatgattctggtccgtttattcctcctgacaaatgagatatcactttatcatattaaaaacaaaaatccagttggagtcttgatacagcagatattgcttctctgttcaagcaggctttctactggcctcagtcagggccagtcaaaacacatgaacaggagagatcaaatctatttgttcttccaacttaagtatactgcaattaaatgcactatttgttgagacagttacagacagttggatagatagagatctttagttatttcattttgtagttttgacttctcttttaatgtaggcattatctaggattatattgtatctttaatcctgatgatagatttgttacttttgttcatggaatttgtgattagtttttatttcgcatctgcaaggaaaagatacactttgcatcatgggagcttgcagttattaattccctgtgattttgtcccacctacactatctgggctaactatattttgtgagacatgtcaaacataaacaaaagcagagaaaattgtcaaatcagtctcaaacacctcacatccagcttcaaaacttcataaaggcctattttatttataaatcccctcatttctgctgccccagcaggccagttagattattttaaagtcattcacaaacatcctattaatggattaataagtattcctgctcccatctgcattatttctagcacaaattcctcaatctcttgggcaatctgatggccccgatacttccttagttttaatgatgcaggtactgggactcagaaaacagtactccaaagtgaaggcctcaaaagcagcctcagaagcagaagtttttctctgaacttctcttgcccctctgtctttcaatcctactcttaccaaagactaaccacagaaactaaaatctctctcccccaaggcaggtcatacagatcggaactccttttccccaaagccagccataaaacctaaaaacattactctaactttccttctacttttctgtataaaaactgtccataaagaaattatctgacctatcccgtttgactgtaggtcataagaccttcattcctgagagggtcctgccccgtacctagaaggaaggaaggcatgtgcagaggccaagaagaatctagacagagaggccttgcaggcttccccaaactgggtctatttgggttagatcataccctttttgtccagtcatatttctatacaactgttcaaatttagttaagcccaagcataaaaatggacaatttcctctgtatctttgggtcttcaccctgaaagttcttgcatacacagtaataaacgtgtatgccttttctcctgtgaatcggcctctcatcagtgattttcagcaacccttcaggagttgaaggggaagttttcccttagcccatactcagatttcctcctatttttgttttttttttttgggtggggggtttatttttgtcatttcagtcagtttatctttactttttatagacatttgctttctgtttctgagcttttaatttttgaaataaatgtgaacttcctttttcaaaataattcttaatggacctcattacccacctcttaggcacacattaaggtctgggtaagagtacgtgaacaccagagagtttggtgttgacacaaaggagacacacattggcataaccacctatgtgatgcagattccgcggtgtgacatgaatgcatagaactcatccctctgtgactccttctgtggaactgaaaagttggctaggccagcctaatataaaagcttatgttactcttgtctaaggtgagccaggagatctatccagagatggctggaatttctcagtgaaggaaatttaatcagatgcgtgaaaaagttttgggcttggaaagcaatcatcaactacactgaagtgataagaaagagtatttatagatttttttttgaaaaagccatcattactttctctttttttctatatatctttgacttttaactactttatttcaaattttgaccagtaaaatagagagagaataatacttcacttgggagctcctggttggcctgttggggaaggggctgggtatatgggtgggattggggtggggaagagctgtaggagacttttgcagagattgaggctatagattgcgctgggccagaggaaacactgctaaaaccactaaaacaaggaaccatattttaaataatctcaatagagtagggaaaagagctatccaacataagaggagtttgaagaggaaacagctaaaataggattgcaaaagaaaaacacattcattactgtcatttgcaggatgaggaaaactgactgatttagcatgggatgggtgtggagagttgggcttaactataagctacctgcaagcttctttctgcaaaaataaagaaacgatagtctaaataaatcctaatcaagcttacattgtagaaaatggttgctttgtaacaggactcacaacagaattctttaaattgcaatcttaaattatttttttcaaaaaagtcaataaaagggatataaaattttttttcaaacaagtcaatgaaggggataaatttttttcatacatttttattgcaaatcttactggattttaacgttcaacaaagcaccacactgtcatataaaacaaaaggcaggtgtatgttggaatactgcatttcaaaatgtctataacttggaaattgttcttctttacctgagtaaggcacaaattaggttggtgcaaaagtaattgtggcttttgcaattattggcaaaaccgcaattacttttgcatcaacctaacacttttaatggcaaaacctacaattacttttgcaccaacctaatactatgactgtgctttgtgtaaaaactggggcccgggatgggtagtgaaagatctattacagtattataaaaggtctgaagaaatatgaggcaggctatgggagcacgaaggtgtgggcactgataaatcacgtgaggtttgcctgaagacacaacaggtgaagaagtatgggagaaattcaactggatgatgggaggcataggtcctaggagaactttctttccaagctaagtagtgtagaccattccaacctcccttctgaatagtgaacaggatttggagacatttacagtaggtatgaagatgaggaaatgggttgagaccaacactataaggaaaaaatatagaaatgtatttgttttgtcctgagggaggcaaagataagcagaaatttcacaagcgaattaagaattattacaaggtaggttatacacagttgttcttctccccatagaactcaaagagaattcacaatagccaaagagtggaagcaacacaagtgtgtattgacagatgaacggataaacaaaatgtggtttatgcatacaatggaatactattcagaaattctgacatacactccaacatagatgaaccctggggacattatgccaagtgaaataatccagtgacaaaaagacaaatactgtatgagttcacttatatgatatatctggggtactcaaattcattgagacagcaagtagaatggtggtttccaggggctgtggggaagaggaacagagaactattgttcagtaggtatgaagtttgagtttcgtaagattaaaagagttgtggggatcgatcacgtaacaacgtgtatgtacttaacactactgaaccgaacaacggttaaaatggtaaattttatgttatgtgttttctaagattagaagagttctggagattaatcacataacaacgtgtatgtacttaacaccactgaacctaacagtggttaaaatggtaaattttatgttatgtgtattttactacaatttttttaaaaaaaagaacttaagggaggacaaacatttcagtggcattgatagaaattagttagacaaaagagtctttttgctttacggctaattaaacattacaaggtactgctgaagggggctctggttttgctaaaagggaaatacaataatttatgagatttttgtgcagctgatctcaaatataaaaacgaggtttgtggtccatgcccactgcctgctgcatgatcactagatagtaatttagcatctctatgctcagtttattcaccttaccaggaaaatcaagccaaaggttcaaaattcctggactgtaatgaagtgtcaacatggccattattactacagggaatacatggaagcactcttcttaagaatgtgacacccagtgttctgaattcccaacttcaggagaaccccacttagttcagctaacaaagggttcagagagttagaactctttgccatgttcctgacacacctgaccatttgtcattcagacagtgaggatgcctggtttgaaggccatgagctggctacattatttggaagggcagagcctagcttattatcttattatggtgtgagagagatgggctcggtttttaaggggatttcatttccttccatggcatgggtgcagttgtgccaggaaggaaactgcttggcaattttcctatctggctcaaacatcatgccactctaccgtgctagggaattccattctggatctgatctgtcaccctgggtaagggtctcggggcctagggttgttagagctgctgtctgtggtgcaggaagtgttatggtcaagcaggaaccacgatacacatgctaagttgtcctctgttttctaccccagccttcaaccaggtcaggaattaatggtgggagtactaaaatgacccagaggactttcccactgccacactactgaggggacagacctgcctccatggctgtgccttaacgatggtccaagaggcaagccaagcactctagcactggctgcaccactgccacctctatgatcagggaaccacctgggagagctctccatgacactcaacaacacatatgcatggtgcatccgatatatgcaagaaagaataaaaagaacttcccccatgtgcctcactcttcttatcaatttgggccatttgccctgaattctcattgccctcatgttgtcttttgctccttcaccctccctctggaactgctactggccctctctggaagtacttcttccaaaaaacaattaccctattacccttccccattttatttttaaccaatgatatttggtcaattttctatttatatggaaaaataaatcttggcatttgcctctggctatttaggaaaaattaattccagatcacctggagatacaaatataagtggtgaaacaatcaccttttggaaggaaacgtagaacatcttgatgattttgaaggaggtaaagttttgttaatttcttaaaggagtaactataatgaaaaaaaaaaaaaaatagggccaggggtggtggctcacgcctataatcccagcactttgggaggccaaggcaggccaatcatgaggtcaagagagcgagaccatcctggccaacatggtgaaaccacatccctactaaaaatacaaaattagctgggcgtgttggcgtgtgcctgtagtcccagctactcgagaggctgaggcagaatcgcttgaacctgggaggtagaggttgcagtgagctgagatcaggccactgcactccagcctagcaagagagcaagactccatctcaaaaaaaaaaaaaaaaaagaaaaaaaaagagctcctataaatcaataagtaaaaatagctacacagcatagaagaaaaacaggcaaaaagctggaattagcacttttgaaggaagtaaagttttgttaacaaaatacagtatccacaaaattacagctagataggaggaataagttctagtgttctgtagcactgtagggtgaatgtgggtaacaacaatttcgtgtatattttcaacaagctagaagagaagatttttgaatgctcacaacactaaaaagtaataaatgtttgaggtgatggatatgctaactaccctgctttaattattacattgtatatatattgaaatatcactctgtgtcccgtaagtatgtataattattaggtgtcaactaaaaatgaaatgaaaaataaataaagtaagtaatcaataaacacacgagaaggcactgaacttcatcggtcatcaggaaaatgtaaattaaaacacaataccatactatgacacacccactggtcatctagaataaaaaccacagagaattctgagtttgggtgagaatgtggaactggcactttggtggttaaagagtaaactggcacagtgattttagaaaactctttggcactatctaccaaacgagcgcattcactgtgacccagccatttcatggccagggctatactcatggaaatcatatatatgttcaccaaaagacatgttcacgaatgttcacagacaatcctaatagtccccaattcaagctctccaaatgtccacccaaaatagacgcacgtagacacatactgagatcttaaacagcacacagaatgaatgacttaaaacctgtgagtgggctgggtgtggtggctcacacctgtaatcccagccctttgggaggccgcagtgggtggatcatgaggtcaggagttcaagaccagcctgaccaactggtgaaaccccgtctctaccaaaaaatacaaaaattagctgggtgtggtggcgggcacctgttacaagtcccagctactcgggaggctgagtcaggagaataacttgaacccaggaagtggaggtcgcagtgagctgagatcacaccactgcactccagtctgggcgacagagcgagactccatctcaaacaaacaaacaaaaaacctgtgggtgaacattacaatgctaacaaacacagccagtcacaaaaaaggaaacactgtatgatttcctttataaaaaatgttcttaaacaggccaaactcatctatcccattcaatatcaaaatggtggttacccttagggggatcggtgtctagaagagggcatgagaggggcttccaggctgaaggaaaagtcccaattcatgacccgggtgctggctacagaagcgtatccactttgtgaaaatttcttgagctgtgtcccatgatttgtgtccttttttctatttatgttgtacttgaataaagattttactatgcttataaaaaataaatggaccaatatcccataatgctccaagaaaagcatgatttttttaaagggtatttgcgaagcccactatgtttccaatttctgtaaattcagatcacaaaggtaaaggagtggagctcatatacctaggagtcaggcgtcctctccaagaccacttctccctcacctcaggcaaatcataaggacagcagctgcccctcacatgggccactatgagcacagtggtgtgcagtgtaacctggaggatgtgtttcaagagtgtgaactcagaagagagagaactgaagaataagttatacttgcaaaacatttgggtgacgactttctcagctaatctttactcagccaaaaaagagataaggtaggtaattacattccctaatttttctgacaaggaagctgaggttcagagagactgagcagtatgctgacatgttcacaatcagggtatggaaggtaatgggtggtcctcccaatgcctagtgcgagagtatttctattgcagcagataagagaaagtcagcagccaaaggggattacaaaaatagtatacagacgacggctccaatggagcaaattcgacagagggaaaacatgggaacctgagagagttatccagaaagtagctgtgaaaatcctgaaagaactaaatcctgaattgaatacagatgagacgaagaaatttgtctgcttgaactgaggagctgtatgaaattagaccaaaaagatgatgacttgattaacgtcagtgatatattaaatctgaaacagtgtgcaggtttggagcaggaaaggactgcaggtggtttaatactttagggggctcttccaacagaatccaagctcgaggagttaaagaccaggattagggtgctgatagtgggaaagacaaggtgggtgaggacaaaaggaatatttagagtataatcggtgaggctagatagctgatttatgactgaaacaatgtagacatcttcaaaaaaaaaaggcggaaaagaataaaaattttattaaagtgaacaattattttgaagaaggaagtggtgccctctccccattaaaaaagaaaatttgggctgggcatggtggtttacgcctataatcccagcactttgggaggcagatgtgggcagatcaccaggtcaggagttcgagaccagcctgaccaacatggtgaaaccccgtctctactaaaaatacaaaaattagccgggtgtggtggcgcgtgcctgtaatcccagtactcaggaggttgaggcaggagaatgaatcacttgaacccgggaggcggaggttgcagtgagccgaggtctcgccactgcactccagcctgggcaacagagcaagacttcatctcaaaaaaaaaaaaaaaaaaaattggatttctgtttcagtagagttggagttacttttttttttttttttttaaagttagggtttctgcatgaggtttctaatggagacaaaatagtattagttttattctaaactatgacacagatggatcatgtatctccatgaagacaacatagttttataggaaactcaaaagcaggaataggaataaggatttcagccttgattttgctattaataagctgtgtgatcttgggcaaatcactttcgttctcctggcctcgatttcttcataaacaaaaaaagtttattgtcctcaatgtctgtaggactttccacctctaagattccatgtaggcagtgggactttaattcatttttaacttgtcatatttagagctctgcgtagcatcatgctgctgtgctctgaagtaaggctccaccaatcacatcaagagatttgtataaataattacacagagcaattctgcatcaacggaattgatttcaaaatcaatgagatctgaaagaatgcagttcaaataactgatgcaagagaaagtgctgaggttaattcaaatgaaggctaacttgacatatccctaaggcttgggggcagcagaaagaccaggaaatctatgagcagagaggtctcactatattccacaaggcatgtgatggaggagacccatgtctatgcgatgcttcctctgtgcctgacacgttgaaatgagatgtcaaagtcaggaggccgggagcggtggctcacgcctgtaatcccagcactttgggaggccgaggcgggtggatcgcctgagctcaggagttcgaggccagcctgggcaacatgctgtaaccctgtctctactaaaatacaaaaaaaaaaaaaaaaaattagccaggcctgggggtggagccttgtaatcccagctcctcaggtggctgaggtgggagaatcgcttgaacccgggaggcagaggttgcagtgagccaagattgcgccaccacactccagccagggtgacaaagctagactccgtctccaaaaaaaaaaaaaaaaacaaaaaaagatgtcaaagtcagaagatgaagttcatagtcatggataggactacattaaaaataatagatccagggcagccagaaattcaagttcagggtccttgggaagagcatcatgaagacagaagaaaatgaatacatactgagcatttaccacagaacaaggtctgatgtattatttcttgagtctcacaactaaaatgaagagctagaattattcccttcatttcacagatggggaaataggctcagagagataatgtgacttatccaagcacacatagttgctaataggtctagaatgaaaatccaggtccatctagctccaaagtgcatattctttcaaccttcccaaacagccagggaacatcagagtgactcttttggttgatgttcctggccatctttgacattctgccaaaacatatgagtgttaaatgcattctttacctatccatctctgaatgcaaatcacccttcctgaaatcttccgaacaggtaatatatatcacacgtttttcaaaggctatcttctgcaagggaagaacatcctgcaaagggaagtccctgagttgtaatgcaaaggtagtgtgccttgaggaataaataaatctggcccatgtacatgtactttttttaagtctatacagccaaacagaactgtgtctgtttttggaagcctctggcagcagaacatgctagaaaaacatgctcttttcatggccatggcaagaaggtagttcctgtgggtcctcgatggtgtgtgtctgggagcaggggaaactgctgggaactctctgtgctgtcagctcgccatcccttgggccgagcccactcacatcaatatttcttttcctgctgttgttatgtgggacccctctgaaaacgtgacttataaggatggaaagaaaactccctttacttgttgtttgaattggcttctgtgggagaggaagacttatatttttgaagcagctcccacaccaaccgaatctggatatgcaattctaagaaccaaatcatcatcaagataagctaaacatcagggttagagcccaggacactgaccagcgccattgatagcagactccttttaaaacttttaacgaccaggtaaagaagaaagagaaaaaaaaattgattcttattctcactagtctttatgacacaatatgtaccaaagcttacttcaagaaaacagcacagggttccctggactccagaggaggagagaaaactcaaggactcttgatcgttaattttggggaacctcatgaaaagataacgaatccatctgtagtcaggtcagatcaaagagtcctcctggaagacaaggggcgagagtgttttgggctcataaattcaagtaagaatcctttatgtttctgttggatcttagagtttcccaagcaattccacacattttctctttcattgactcttagaaacagtaaaaataaaccagtaacttacaaggctcattgcttcaacccctgatccccctttctatgttaacttcattgagggaactcatgtattcataagatgtaaaataccatttctaacacggtaggcattgtcccaaattctgttttaaagtggtttctgtctcctaggagccggtgtgcttctatcaatgtcctatcaaagtatcaaataatatccaaagaaataactttacaacactgaaaactaaaattcacaaacaacctaattatgtcagaatctgtaagatgatcagagcctcagaaaccacctgggaaaggtaggaatatgttgtacttccccaccgtggggccatctctggacttccgacattctttgtgtaccaagcaaaaagtaatatttcctactttgagggtaagcatctctttaattttttttttttttttagcctaagtgccaatcttgcctcaccctggtcctggccctggcagagatccacaatttgaaaatactagcaagtttttagagtttgagaaaaaaggaagtacttcctggcatttaaacagaaagagaaacaaataacatgacacctaggctactgacaaatgaaggaggagacgggggagttgggctttagccttcagtaataagtgcccaaagtggagaagagcttaaagggaaaaagacctttatgctcagctaagttttatttcatttgatgacatatgaaaatgacattttcagatatgcaatggtttaaaaaacttaacacccatgtaaccctgggaaacaaacaaactcgaaggttcatttcaactgaacaataaatagagaaaaattaaaagcacaagaatgaaaaagtgagtgtatttcagtaaaatgaggggccatgtaaaatcagtcaaaatagaaatgtcttaaagaattattcttaatgtgtccataaaaatgatgacaaatacacagcagaaataaaatgtaattaagttagttaggatctaaagcctgatcgatatttacaagcccttagaagtgtgtgtgtatttgtgtgcgagagagagacagagagagattgataggttacaaggagacagagaagagagcaagaagatagaagaaaaaaagagaagaatctagaatctaccagagataggaaagtgcaaggactgtattcttccaagcagcaccactaaaaattagaactggaaagaaccttagaaatcccctaatccagctgcttcatttcacagatgttgaaaggtttgagaaggggcttgtcctaagtcattcagccgaaagaacacaaaaagccaggcttagattctgagtcttctgatgcttggctcactgttctttctatgttacattattctgcctgaattctagaaatataatgtgcccagggcttgattatctgaaaaacaaaattcatcttgggggctgggggtggaattccctcgtagtgcttctgaactgtgaaagttacattaaatgttgagtcctgattaaagggagaactggcttttcttcagcctacctggttctcaggtcagcatctagaaggggagaatggaattcttattcaaagtggggagagcctgggccaagggcaggcccctctcctggctctgtggtggctgccacagcaaaccccacatctaggctgatctgcgctcttgacaggagttttataaatgattagtctgagagctgtgctatcggcttttgtgcaactgcaggcagctgcttcggaacagagagctctcatcagccaggaattatcgagtctttgcatatgtgcagctggagataaggggggaaaacgtgtttttccttgcttgcaaatcaacaatctaaggagagtggggaagctgagagagaaacatgatgaggataaatcaaaattttagaaaggttcttcgtcatattttggcgatggtggttttttttgttgttggttgtttgttcattcgctatttttctgtcagtttattttattctactagttagattctggacacacggtaggtgctaaatcaatatgtcttttaagtttgaaccaggagaagtgacttgcagctatgattttggcaggagtctggggtcttgaactgctaggatattctttctaaaatttgccatcctcaccctgtgtgaatatctcagtgtccttgatttttttttttttttatacgaagtcttgctctgtgacccaggctggagtgcagtggcgagatcttggctcactgcaacctccacttcccaggttcaagtgagtctcctgcctcagcctcccgcgtagctgggattacaggcacccaccaccatgtccttgattttgaacaggagaaaaggagaaacattttgtctcatacagatcaaaacaaacttccaaaataatctcttattaatcactcttatgatataaaacctccaaaataataatgtcatcatgaaatgaggcatgcagacaaaacaaactttgggaaagccatcccggagttggcattttacatagcctcttagtgcagctgtaccacgtaccactacgaagaagtaaaaccatccatccaatagggacacaggtaagaagggctctgactttaagtcccacaatttggtagttcccacaaattgcatacacacacaaatttattacagaaaccgtcactccagcatcagcatagtgcaaccagaaaccctaaatatccactctcatatttaaatcccagggaaatgcttctgcaaacctcttgccctgtgtctttaaaacaaaagggccaaatgctgagaacatacaggggttgtgttgcagcagatagacactgcttcaagttaggggaaggatttgggtgagggaagtagttagctaagagaaaaaaaatcaaattaagtagcttatccagtgcttcctatcagagagcatgaaatagcctcttgaagtaaaagtatcatttcctggtattactgagtgctcatttctctgcttctcctcctaatccagttcacggtcctgaagatattaacacattatggaggtaatcacaacattcgcacgtggaggtggaggggcatattttataatgaagcaactgatgccactctgacatgtataaatatgtaggtctagatgaaacagctgaagcatggtactgattctttctagtggcaactagatggatgttaaaagctagaatggagaacagttctaactttataaatatgtttgagatttaattacaatttaaaaattaggaagtcaatttaaaataatttttatttcaacattttatatttattaattagaatctatattttgtctttgaattttgatagataacttggaatattttagaaataaagacaacttttaaatacacgtggaaataattttcatttcttaaattttacatttactttaattcatattttggatcaaaatatattcaaatttgtacacttgcacttcaaaaatcctttagatcagaggtcatcaagctatggcccacaggccaacaccagctagttttttaaactgcatgatccctgaggtcaggagatcgagaccatcctggctaacaaggtgaaaccccgtctctactaaaaatacaaaaaattagccgggcgcggtggcgggcgcctgtagtcccagctactggggaggctgaggcaggagaatggcgtgaacccgggaagcggagcttgcagtgagccgagattgcgccactgcagtccgcagtccggcctgggcgacagagcgagactccgtctcaaaaaaaaaaaaaaaaaaaaaactgcatgatcccatttatatgacacattcagaataagcaaatctatagtgacagaaagcagattagttgttgccaagggctgaggggtgtggggaataggagtgagtgcttaacaggcatgacgtttccttttgacgagatgaaagtgctctgggattggatagcagtggtggtcagctatttttgtcaataaagttttattgaaacatagccatgtccatttgcaaatgtatcctctcggcagcttttgaaccacaaacactggactgggtacttgtgacagagatcacgtggcctgcaaaatattcattatctggaccttttcataaaacatttttcacctcctgctttagaccattgctgtcagtagaataaaattagtattcaaaatcttgattgtagcataattagtattttgttgaaattaagggataaaaaaataaattgtactgcgtaagtatgtagtagttcatgatctgcgtatgtctttgttttattactcatcccaacattgctggcccatcaacagaatgcccaaatgagcaataataattaaattgagtcatttttggtcatttgccaactttcagacatagaaaaataatagatttatatattttttctgttttgttgttaggagggaatatttgtcaaaataggagaataggatgtatttcatgtaacagtttattagcttgattcataactttttaaatgttcagacatagggtatgcgggccttcattcagggacctgaaatgtaaagggtgggccagaagaaaacacaccaggacttagagctaagtcatggtgaaggaaaacaaggccggcagacaggctgtccattccaaaaaagcctggggctgtcaggagctaaactttccagatgaggcacttcacgcggactaggtggctccaccgcagcagaaatgctgcagacgcctcacatctgtgtgacggaacagaaatccctcttctttcagcacaggaaaacgaaacatgctaggctctggggggagcagcccatttggaaaatagcagctttccaaatgggcttttaaaaaaattaaacttcaacaacattcaaaaaattctacatgcaaaaaaggttcattacagaaaacttagaaaattcccagagaagcacaaaattctagaaagtaaaattactcaaccaccgctccgatatagcatttaaaaatacatccatgcagatctcattctatgcagagctttatgttaataacttatttataaaattcaattatattgtgcacacactattctaaactgccttttgcactctggaataaatagaaacaccattcttgtcattaattacacatctacttcgttttaaattgctgcgcagtatcctattttatgaaatgccataaagtgtttagtgaatcccttattattggatacgtgggttgtttctaaagtcaaacattttcattcacatgtttaattgtttcctcgaagtagaaatgaaggcatgagtattttaaaagctttggagccatactgtaaaacttctatgaaggtatttatattttgtctttgaatcttaatatattatttaaaatattttggttccatttcagtatattaaagtatatattttctcatacactccttaacactttgtattatatttaaattgcttctagtaagcatagggaaatgattttttaatattttaatacttatgttttcaattagaccatttcccagatgtttatcaagattatgattttcaaagacattttttggttatgtatgttttgtctatttttttctaatgggattttttttcttagatttcaaatattttctttacattaatgatatttatcccttgtcttttaggtagcaaacatccagtttatcctttcttgtttctttttttatttatagtggtttttaaaaaatagttttaaatccatcaatgtttttctttatgacttttgcttttcctttatgatgtttcctaagaaaggcctttctaatcttaacattaaataaataaatatccatctttgacttgtattttatttatttttaaattcagtttaaatcatggttaaagtcaaatttgaaatatatatattttaaaattatgaacaagtacctgtccttttatccagtactgacacgccacctacatcatatactaagttgctatgtatccttcattttgtgtttggagttttgatactgttctatgcttgtcctggcattagtagagcactcttttaattattgcaatttggctgggtgtgatggcccatgcctgtaatcccagcactttgagaggacaaggagggtggatcatgggaggtcaggtgtttataggtatggcgtttccttttgaggaaacgttgccagagacgaggagagggtaagactacaaagtgatagcatgagattaaagtgatgaaactgttttatattcagatggtggtgttggttatgcaaatcagtacacatactggatttcatagagttgtcttccagaaatgtcagttttgctaaatgttaatttaaatataaaacaaaataagaattttactgaggaacataaaagaaaatttatatcaataaaagccatataattttcctagattaatgaactatatgtactaaaaagtcatctcttcctaaactagtacttacattttatgaaatgccaattcaaatggaaatgaagagggaaaggggatttaattaaaatattgtataattcttcaatgtatttggaagaaaatacattcaataaaaaatgttctagaataggaaatttcacattagatctgagacatataaaattgcaataacatatattttctgagacgagtttccctcttttgcccaggctggagtgcagggcactatcttggctcactgcaacttccacctcttgggttcaggcgattctcccgcctcagcttcccgagtagctggcataacaggcatgtgccatcatacctggctaatttttgtatttttagtagagatgggttttcaccatgttggccaggctgttcttgaactcgtgacctcaggtgatctgcctgccttcgcctcccaaagtgctgggattacaggcatgagccactgtgtccaaccagtttgtttcagttttttttttttttttttttttgctgaatagtattctattgcctacatgcaccacgatttgtttatccatttaactgctggaggacatcgtggtcagtaacagttttcaatgtttatgactagaactgttattaacattttgcagaggttgtatgtgaatacaagttttaccataggctaaatagtaaggagcaaaattgctgggtcatttaacaagtatatgtgtaactttataagtaactgccaaactgttttaaaaagtgtctcccatttctcatttcccaaaagcaatgtatgagggtttcttttgctccacatccttgtcagcacttaatgttatcagtttttaaaaataattttagccattctaatagttgtgtggtggtatcacatggtggttttaatttaccttttcctattgatgaatgatgttgaacgtctttttatgtgtttaattgcctccttattgaaatgtttattacagttttttgcccatttttacatggggctgtttattttcttactgctgagttttaaaagttctttatatattcacgggcctggcgtgttggctcacacctgtaatcccagcagtttggaaggccgaagcgggcgaatcacgaggtcaggagtttgagaccagcctggccaacatggagaaagcccgttgctactaaaaatacaaacaatgagccaggcatggtggcacgtgcctgtaatcccagctactcggaaggctgaggcaggagaatcgcttgaacccaggaggcagaggttgcggtgagcagagattgcatcattggactccagcctgggtgacagcgcaagactctgtctcaaaaaaataaaaaaataaataaataaataaaagttctttatatattcaaaataaaagtcctttgttggataggaggtttttccaagtgttttcctagtttgtagtttgacttcgcatttattttaacagtgtctttggctgagcaaaagttttttaattttgatgaagtccaatttatcaatttattttatggattatgcttttagcacctgtgtatgaactctttgcctagacccaagtcatgaagccttaataaagcttttaacaggcaagttgtacacgcttcttgttgagattatttcaacatactttaatttttactgttattgtgaatgagatcttgatgtttcatttgatctaaatataccttaagctgttcttttttaagatgcagaagttatactttcaatcgagtgattttttggaaacgttttctttctcccattaaatcaaacagatcaatgtatttacacagaattatggtctagtgcctcagcttcccaagtagctgggattacaggcgcctgccactacgcccggctaattttttatatttttagtagagacagggtttcaccgtgttagccaggatggtcttgatctcctgacctcgtgacccgcccgcctcggcctcctaaagtgctgggattacaggcgtgagccactgtgccccgccaaggcagaggttcctaacttgagttccaagaatgagtatcaggaaacagtgaacttacaataagtgtatgtaaaagtgtggaaatgagcatacatgcgtttttctgaggggaaaatttgaaatgtcatcagatactctaaaaagatcatcccttttcaattaggcacattcatattctagccatactctcatttcaaacatatctaaatcactgaacaaatttaataaatatttagtgaatgaacgttattaataaatggctaacattaggtttgacctaaagtgcaaaatttttatttagtaaacatttattgaacgtctaccttggccaagcatcctattggctacatgaataaaaaggtaatgtccctgagacaaaaagcttaccatctagagggcaggtagacataataacaaatgtatttcaatgggaaaattactataagggaatgtttatgttcacagaaggagtactgaatctgcctgaggaatttagaaaaagcttcacaaatacagaagtgcttgagtgaagaaaagaatgatgataaaactagagccataagtgacctcccaataatttgcatattctgtaaacttgagatattgcagagtgagtcagatatagagaatgggaactaataatcaattatatgtaaatttattttattattattattattttttgagagggagtctcactctgtcgccgaggctggaatgcagtggtgcaatcttggctcactacaacctccgcctcccaggttcaagcgattctcctgccttagcctcccaagtagctgggattacaggcgcctgccaccatctctggctaattttcagtagagacagggttttgccatgttggctaggctgatctcaaactcctgacctcaggtgatccattggcctcggcctcccaaagtgttgggattacaggcatgagtcactgtgcctggccgtaaatttattttctaatagagttttattatagtttatcagagtcaactgggagaggaaggattctagaagaaaagtgcttgaaaaaatggaggcataagagactagtgcttgtaaaaatggaggcatattcagagaactataagtggctcagtcttactggagggtgaggtaggaaggatcctacagtctgacttgtacaaatttaatttacagaaattacagtggaaatacacaaatatttatgtaagatggtgtctattgtagcactgttaacaagcttctcaaaacaggaaataacttaatcattattagcttaatccatcattagaggactgctgaaaaatctctaatttattcatacaatgtaacatttcccaatgttaaaaagattgagttacatctgtttccaatggcttagaaagagccccaaaatagtattaggttacaaaacaagtcataaaacaataagatactatctcatgtttgtaaaaacaggcaataaaaaaatgttttgagttagaatgtgttttagtattaggttgagtgtgttgacgggtccaattcttcattcctctctttatccctgccatttgccatggactttctagttttttcatcaggagtggaatctgttttcccatttcttgatacttagtttatccatgtgacttgctttggccaatggaacattagcacttgtgctacaagaagagacttgaaaattctccatcactgtgaggacatctctggactagccttctgaaggatgaaagacagatggaacaaagtcaaggtacttcagttatcccaggaaagccctccctaggtcagccttcagccagctaattccttctgcacaggctcagccaagatcagcagagccatctggtcgacccacagctgaccacagacacataagcaaggccagctgagatcccaagttagcctggatcagctaaaacctgcagacttataaaataaataactgttattgtatgtctctgaggttttgtggtaatgttatgaagcattattttagccctagataactgataggctatatttgtatataatatgtgcttaccaaaaatctggacagatacataacaaattattaacagtggttacctctaggaaatggaatgggtggttaacattgtacttccatacactgaaagtattgatgtaccctctaagaaattgaattgctgtttttgctttgatccattttctctgcttaatgtgttcttaaaacaccaaaaatagataagaaaataggtcttgatcctggtagctgcctagggccttaagattaagtctgaatggttacagaactaacgttctaaaaagtttgagaataattggcttttgttcttatctatcacgctgataggttgaacatcagtgaatgagacacttaacctctattttagcccatttttctttatttataaagctgcaaacggctgatgctgggggtgagatcattgagataatgattatgtctattttgaagaggaacagccatataagaaactgttaaaagtacccaaagttctgtataaatgtattataagctgaaagtgcttagaatagcaatgatgatgatgatgatgatgatggtgatgataatttgttaattttaacccacactaagagccaactgctacatgatctattaatcttcttgagattgacctaatttggcctttcagattattaaaagagctgagttattttataagtaagtggattctgatgtatggttattttattcattcatgccaactctctgggagaaaatttaattattgttttaatctttaccaagtctagaaaaaaaaaagtaactccaacctattgatttggtttgattgctcaccccacattaagcttcaaccaatagttttaacaaatggcaagcatttaaaattactgtaggcatccaaaatatcagagagtcttctcccgtgtgaagcatagaacttattagaggtagcaggatgggaaaatagcatgaaactatgtcaagtttgagggttaaaagtacctgattccatctcctaataactatctgaccctaattttcttaatttctgtatcttagtttcctcatccattgaaaagaaataatgaatagaaaattcatgttatagaaattaaattcagttgcttgccaccacctccctacatctatcctctaattaataaaaaggctggtaaaggttcaataaagaatggatatgttattgctattgacactcttcatgtctcttatgctattgctttgactcattaattttctcttccccagtatgctattattttctcatgtctgcttaagcagtgatgcgaaacaaaatctgatataatttaggacagtttcactatcatccaatcctcttaaagctacagtatgtttgaagggaaacaaacctttgaaaattgtatcagtcctactgcacattcggatattataagatcctggtcagaagacagggtaacttgccaaatgttacatcaaccgaataggaacaaaaatctaggaccctattctgcaggccagagcaacgtctgaaatatatcccaaccagtctatgtctgtagaaccagtcaacagtgagccaacaatgctgaagaatatgcaaatattttcatttctttctttctttctttttttttttggggaaatagagtcttgctctgtcacccaggctggagtgcaatggcacaatctcgactcactgcaacctccacctcctgggttcaagcgattctcctgcctcagcttcccaaatagctgggattacaggcacccaccaggcctggctaatttttgtatttttagtagagatggaatttcaccatgttggtcaggctggtttctaactcctgacctcaagtgatctgcccacctcgacctcccaaagtggtgggatcatttagatttttaagtgcttattcattggaaaactggaacaatatccttgtttgttgaatttggtgagagtttgctctgacaacctcaaaccttccaaccaaaagcaacttcatgggcttctttccaaattctctatggtttacaagcattctgttgggcttccccagtcccactgacacccttttttctacatggcagcagctgtctgtggtggcagaactcccaaactcttgcttctgagtttgagtcaccatttgcctcttggccgggttggtctacagactccatcagaagtccccgtgttttgtgttctgctttcagatcctttgctaattgcttctttcttttgaggggcacaaaaactgcttgagcttccctgccccagtaggcaggatgttctctgctttcagatgtgtcagcccttccaaaatgtagtcttgatcttgggaaaagaagtaattagcctgatggggaataaactgctgtttcagcagttttctcactaccgggttttgaagtaatagagggccaggcaggtcagaaagaagttgagtgctgttgagtttcaatgccccactaagctcacatagcaactactggcactcaaagctcattagttctaacccaacacagctaatctccccgagtgatgaatccgctttcatggacacttagagaggcattcgttaacgtttaacctcaacgtgccctgcatggccttcaaggtctcacaagttgatataaacttgaagaaagagtacatcaagcactataataggaaagatgggcctactttgtggggtcttcatatagacaaaaattgctctaattattcctcttagaagaactttatcatattgttacaggcaatgttcctctcttcttggtaaccctaggattgagggaagtgtgtttacatctgtggatacaactctttagataggagtttctcaaccccaacacgactgacgttccaggatggataattctttgtttgggggctgttctatgcattgtaaaatttaggcagcatctctggactgaatagatagatgccagtagcaacctcccttccctccactccccctctagggtgtgataacaactgctagtgtctccagacgtggccaaatgtctcctgggggcaaaactgtcctctgatgaaaaccactgctttagaaaattgccaccaacatttaatttaaaaagtggaatacagcaaaataggatcagataaaaaatatcagacagcatagcataagagaagtaattgtttcgtgaacatgtatttcatattcatctgtttgtatgtatgtatatgcagataaataacatggattatggtaaaaaaaaaaaagttaacaataccgagagagtatcttgaccctcagaaagcctattatttatctgtgctattactaagagatgggttatagtctcccacttagaaatctctatttctcttcaatattgtattgtatgcttttgtttggttgttttaatttaatatggttttctttcaacaactaatgggcactttgttttctaccttattaacacaagtttagtgatttctgtctaccttagataatataaaagtatcaaaacaaaatatcatgggtcattcaggagattagggagtctatatgctgaaggaaatagcaaaatatgtgcaaagctgcccaatcttgccatctctgggcttattatatatttcaggagacaattattaagcaatgtgtatttaaatctcactttacagacagatgacacaggtcagatggttaatatcaagtcaaattagacaagaaaatggcatttgctgtcagttgggggcatatgcatgaacacataaaaactgaaacaataaaaaaatggcaaaataatatttaatgataccaaagctgtttcaagtcaagtcaagcttcataatcacacacacacacacaccacacacacacagagagacacacacacacacacacacacacacacaaagcaagtacaaaagataaccttttcagttttggccataagtttgtggtaaccatagaacacagaagtggagctttatccagagtggtaaagctaaaacagacagctagggtgagtgagaaatgccgaatacttagaaaaaaaatagaaaagggtcaagatggaaaccaaaggcagaagtgagaagttatacaagctaggaagttcacagaagacagaggatgaactaggtctcaagagtccagcatctgagactctaggatcaagctaaagacaaagtgaagctttctctatttttttcttaaatatttcctttctagaaaagaaaaaaacaacccaatctgcatttgaagaactggccatatagttgtgtggaaagtgggtgaaataacaaggaaacgacaaagaatatggccagtctagttaatttcttgagcaggaaactggatcagttaacggaaacaaataacgtagtaatgggtaagacaaagcctggatatttgagagcccacatttgggggaaaattacgaagacagagggcagtgtcatatggaagaggaaacgaaaaggatgcaggaaatcatttttaaatgtacctgtgatctatggtgttgaatatcaaatgttgcaaagatgttgagaaatggcagatctgataatggtggattgctattgcccctggaaagaactttccatagaatttgtgccctccacactaagagaggttttctgggtgctacagaaaatagataagagttagttttacacggaaaaatctccaatagttttctctcggtaagtttttgcctgttttcaattggttgtttttgcctgctttgtttcccacagagagttttagcaacttgtgtcttttgatagagaatttatttcagatatatctaaaattcattattgtagagttatgtaatgtatgttttataatttctttgttatttttggccgtatctagtctcattgttttattactttttgttctttttcaagtttgggggcatgaatgcttatttacccattttcattcttcctaccttaatattaaaatacataaaaatgtgaattcattctatttacatcactgactgtacaaacatgataggtatatagtgttatcatttggctcttacatacatggtctttagctgcatgtttgatttcctctttacaggttttaaaaaatagtttttaaccttatattgattttattaattttatttttcctttgttattacttgtcactcacagagtatgagtttgtggccaagtatatacacattttacaaatacatcacagacttttgaaacgactattttctgtgtggataagtagccttctgatagctatttatcacatcaaaattaagcctatatatttgagacagggtctcactctgtcacccaggccagagtgcagtgacatgatctcggctcactgcagcctcaagctccagggctcaagcgatcctcctgagtcagcctcctgagtagctgagactacaggcacacactaccacacccggctaatttttgttttttttgtagatatggggtatcaccacgttgcccagggggaggactctggtgagctgcctgcctcagcctcccaaagtgttgggattacaggtgtgcgccattgagcccggcttaagcatatttttgatatttctatatttattcttgtttttccaattgctctggcaaaagttcaaatgaatgtattagaatattccaccagtactgtggtatttttaaaaaatttctacgtgttctatggattgtatcaatatcaatttcctggctttaatatggtacaatagttatagaaggtgataacattgggagaggctgggtgaagggtacataggaactttctgcaaaatttattcacattcctacaaatctataattgtttccaaataaaagtaaaagtaaattttaaaagtcactgcttgcatttctaacagctttcatgtcatatattttgatgttagtggttatgccatctactacataaaggttcataaatattaagctataaattatacccttgattattaaaaatagatatttttgttttatttaacatgttttaccttgaattttactttgcctgatgctaattttgttaccccagcttgctttcttttattttctttcttttctgtcttggagtatgtatgtatgagtgtgtctgcatactcgcaagtctggtaagtcagctttgaccatcctacatttttaaacttatttcatattgttttagtatgtctgttacaaataagaaataatgatcacagattcttattcctcctattatgatgtaattttagttcattcatttttattgtgatgtcttaactttctttataccttaaccatatcaggtaatttggacagttaaaaattattgtcctaatttttttttccttaaaactgtaatattaggctaatgctttctgaaatgtaatatttcaaggaagacatctaatgccagcattattttttttttcctctgaggcaacctgtttttgtcatctagataattgcagggtttttgtgtgctgatgttgttgttttcccttgattaaacttttctccttggaatcaggatacatttaggccactttcattacttttgcatgatactcagttaaccttttcaaattacagactgaaatctggagaaaacaaattagagattttctcctgttttctcccatttcatactgaaactctatatcatagagggtcaggaaggcaggacattcattctgatccctccaattgactctgttcttctaaacgactgagttttatgtttgatcatgttccttcctgctgaccttacagggcaccagaggtgaatctatatttgtccatatttgggactgaaacagcttctgtttttctgagtgcctgttgaaatctgttcagggccagaggaagggagaagagaaatgttacccttttttttttctgtgatttactttatcaaattaaaagtcaaataaatatcccaagaggaggaggcagggagacagcacaggaactggtatgccaaggctgagacctgaggctggctgcactaagcccccagctgtacttgacatgatatcctaggagactgggatatcagtcctccaggcaccaaccttgccatctgcaggcctgaatcctgcttgttcagtcctggcccttggcgtctccacagggcagtcttagaatctgccctgtgtcactgccctgcagtgcgccctccctggggcccagtatctgagctctggggtttgcagatggtcccttctgcttccttctgagaacaagctttccttcagaggctcctgtcccaacttcccagttgctgtcgcctcaatccagacttccctgcattgtatcttagagaatttatgagctctttagtaggtagacggtgattgttctttttccgttactgacagtgctttttccttcttgctactatttctttggccatgtcactgggaattggggggaaggaaacacttaaagcaaaaatttttattgccatattgaacttggatacaactttaatttttatatatatatatatatatatatatatatatatatatatattattgggttggtctgtgattaattttcatttcctcaaggttaaaaaatatatattctcctcacctgaggatactaggcagatcagagtaaagttaaagccactcacagtggtcattttctttttattttattttattttttatttttttaagacagagtttcgctcttgttgcccaggctggagtgcaatggcatgatctcggcttacagcaacctccgcctcccaggttcaagcgattctcctgcctcagcctcccgagtagctgggattacaggcatgtgccaccacgcccagctaatatttttttttgtatttttagtagagacgagtttctccatgttggtcagcctggtctcgaactcccgacctcaggtgatctacccgccttggcctctcaaagtgctgggattataggcgtgagccaccgcacccggcccacagtggtggttttctatgggggctgccacatactttgctgctggctgggcactattctgggaactgagaatcccatttccagagacttcctgcacaatggattgttccagccccaaacaacctacctgctttgccttcctcaagccccaagagctgaggctgctatacgtgggaaacagcaggtcccaggactgaacccagacagcctgggtctgcacttaccttccacccctctttcattcctttaaactgattttttttctctcttgcctgcactaaagacactgaactatgttcctatctgctatatccacaaaatgatcctttagaaaaaggagagggagggcatggagcattaaaaagaaaaagagatagaatacccaagggacacagagttgattctgtccaattatacttttaaaattcccctaattgctctgtttaattattgatgtggaaagtgtttccttttggggagggagttaagtaatcaagagccctcaggaccaagaagacagacatcacctgctctgggtttggtaattaaggcattatccatcaccccaggagcggagtggaccctggtgggagagtgaagcccccctgctccccacagcacaaagattgctcaccacaaagtgccaagagcccaggtctttggaaatgcgtctaagataaccccacagcccagcagcttctaggaagactgattgatcaacagaaagggaaacaaactctgctccaatgtattcccattctgctcattgattttcctccttttacaaacaaacatttgttcgtaggcttccaactatggctgcagcggatctggctttgtggagtttagctcccctccattatctgtaattgcgtggggacttcaagtcacaaaaggctaatatttaaagtgtcaatattcttggttgctgtttgcttttttgggaaatgtataattaaagtacaatgacctactgcagatatcacgatatcactaataatgttcttatttttttttacagctatcaacattcattcttcttggcccccaggaataagcagtgcctcctggggtggccagatacatgtatactgatccgtgtcatcggaaagaaggaggggatctactggattctgatttgggatccaattcagaatggatcatacagtcagggaagttataatgcagtataagtaacgaacgtctccattcctaatgtaatgtgaaggctgcactgcatgggctccaaagtcccatctacctctaaccttctggacatgtgggtcaaggaataaaaactctggcaggcaacaaaaaggatgggaaatgtgacaggcacagagatgtgctactcagatcacccttcaggaaaggacttgcctgccatccagctgtgtgacgtgtgggcagccgacaggtttcagctgttagagcctttaggctccatctcactctcgagctcatggattgctcagagcagagcttggtcaatagtggaacaaggtggtgacaccaaggcttagcccagtgactcctgtgctgagcgatctttgctccagagttccccattggtctggcagagactgtcaggtctgcatgagggtctacccaatccaacttccctccctttacttgtacagagttccctctctaagacaccttttgtacttctaactccctcttaggatctgcttcctggagaacccccatggtgacagaggatgagttgcaaacaaagtggcatgcaatgcagaagagggtgtgatggatccaaccactgggggaactgaggaaggtgaagtcatgaaggaaactgcatttgagttgactctgaagatgaacaggagttgaatgagtaggaaagaagaaaataggcatttcaagcagcgggatggacacatgcacaaaggcatgttataaagagcaggatgtgggagcatgggtaatgcatggaaccatgtggacgtgtgcagtggtcggggtgggggatgaagcggggagataaagctgggaaatacgggatccaacataaacagctgtcacaaacactctatgtatatactcctattggtttgtagactctgataaagggaaatggtagtcctgggagaagaatgagctgtacaaagcaataaaatatgtagaattccatagcatagtatttttgacagccctaaaacagatattttacttctatgtaggtggtttccttgaaaaaatagcacctgctatttgttaaggagagaatgaattacttgtcccatggtacagttaaatcaatcatatcataacaccaatctatcatgtaaaattcatctctaggcccatgttttgaggaaagaaaatggcagttaatattcctattgctgactacttattcaagagaagaaaaagacatgtttatgtggttctaaaataacttccttaagcccattatcaaattctaacaaggaagaccatccatcctaaggaagttattttataaatcataatttgcttttattaaaaaaaaattaccaaactgcattccaagaaacacagagtcctgtgggtttttcattaaaatgctttccactgtcattgtaatatgggaaacactgtatgtgacaaatcccatttgacttttcacagtgaatcttagaagtccacagactttaaaagtctactgtaaaaaatccatttatgtttgttgaattcatttcctattcatatttgatcacaaaatcctcctaccttcacggctctcaagaaagatatggaaataacactacagggaaaacattttgtgggttgactttgaggaattcaaaagcatttcctatcaaaacttgctgaacacaaccccaaagtctccttgtaaatgttttagggttactccatgaaatgagaggatggctaagcaggtgggttctagagctcccccccaccccaattcagtcatcatgaattgtattatatattaagaatttgtaacagatgtttaaggaaaaaaaatgagttctagtgctacaaatatttgaaaccacaacagcaatcaatcaatttatgtaactacacacacacacacacacacacacacatacacacgggttggggtgggcatatacctaccattaggaaaaggagaaagaccaggggcttgatctcagaagaagaaatgcccccttttcattcctttgaatagatgcaatacaaagttcccaaaggacactcctgctcagacatatgcagtcccacctaaaatatagttcttatttttagctttgaataagttaagaggaaattgcaaggatcattatcactaatcatttgaggtataaatgatgtctacaaaggatatccagaaaagatggtgacaagaagttatgggtcaaatgacaatcacaacaacaatatcaacaaggtagttcacatacatcatctctaatcctgacaaacgccaagcaaggtggcattattattcccactctccaaatgactgaagtgtagagagcttcagtaacttgtaccaagttagccagatgataaggaggtgtggagagacttgaacccaagacaggcagatttcaaaggcggtcctgttacaaaggcagtgggtcacactaacttttaaaaatcatatatagacaatctaacaatctgtttggttatgaaacaaaatagattgatgcttctcaaagttacctccctttgtaagacttgggggagcctgccaccaccccaaaagctgatagtcctgaatcatggcctttctctgctttatcctccccatggccacagtcagcacaagtcacagtcaatacaagtataagcaactcaatcgctcagttttctgtatgtggcttttcattttttcagtgtgacaaatgaatacgaggcaggcattttctttcttccacccagtagttttacagtattgactcaagcccttcctctcttcccctgagacctctttgaggtgggccagtgaggatcctgatccctcttctctggctagaaatgaacccagtgactttcacatcctgataaacagaatcagatgctattgagtgtttccatttgattgggtcaagcaactattcctgaggtcgattcagtgtcatctgaactcaagagaatccatgtattgcatgagcttaaacttcttaatttaatcaagcatttagggaataagcacaaaaagatggctgtgcaattttatcgcgatatctttcctaagtgaattcaaagcaaagcatgggttgactttgctcaaagaatgaccaactcttaaaacatgtccattagtaaatagctcactcttcaaaatcaagaactcggggttgtattttcatccatttttctcacagttgcaattcctgatgaactagctcccgttgcatatcaccttccctttcatcagaacaggagttttcaaatggcagctataatggtggagtttgggtggggtgctgatcctacccacatcccgatatctgagtgagaaaaacgaaataggttttgtcccctttaaaagtgtttcagacaggaaagacctccttgaatgttataaacttgaatgggaaaaaatgttcattctccttccccacccccacccagttcccagcatctttgtttgaaccaagtctcaaaaaacatgtaaatcttggcccagactaagcaaatcaccttaaaaaggaaggttagagaactgtttattatttgaaatgtctctctccagaccttatttttgataaattggcttcagcttcattacttcatgatatatctcccttgacatttaattatacttactccaaacacattaagcgaatcagtctgaacagcttcttattaatatgcaaatttctcctttgaaaacccatgaatctgtgaaaaatctctttaggcttccattaaacccactcaggaagttgtatacctcacacagacacttgccttattcactgactcaatgattcagcatttactaattgtctgagttaactattctggccacatcaaggggaggtggtaggaaagagagaggggacagggaatcaaatgggattcagaagctgaacacttaaaagatgaatgatcagaggccaggcttgaattagcggctggtagttagagctcaaaatcaaggctctttgcaagcacaatcagccagatgacttgaaacagcgtactttaaggggagaagccacggacttagttcaccaatgacttctctggcagttctgtttcagatgaagacgggctgctgaacacaggatcttctacacatctcttatgccctcccaagcactggctgcacttgtgttcctttaccattgcatttgcaaaagatctgattgtcatcaggtaacacagcggggcataggtagagtggttctagttagcaatggtgccaggaagaccaggggctgaccaggagaatgctgagttcaaattaggaaacagggtcctaaggctgttgggggtcagaagcaaatttcaaagaagcctgggttttagaaactgagaaacaaagcctagcgcttcaggagctagctgaacacctagcaacaaggagatggaggcaatatcgtgaggaaatgagttttccaggagagtccagggcccgaggggggccagaatgaaaggggaataaagtggagatcaacacaagcaagatgggtattaggagtttacgagagagtcgctcttaaatatctgctgatggaatactgaagatgggcaaagacaatcattttccatagtcctatcagacaaaagtctgaaactggggacatctgggcagcaggagatagaagcatcagagagcagcatgcaggattcaggttctggtgttttttatcatctttgttgagtatttccaagacatatttgcaactagtaaacaatatggttatggttacacacacacaaatacatatacgtgtgtgtgtgtgtgtatatgtttatatacacacacacacacacacacatgctttgacttatgataaaaatggaggaaatataataggctgttttcagtgacatctggatctcaccctgaataatctcatccactctagacctcagttccatcatcttatcaaaaaaggacaacagcacctgctccatcctttttatagtgttgctgtaagaattaaattgaatagaatatgtcaagattgtggaggaggggggaactgtgtaaagtgtaaaatatctacatgtataaggttaatatatatagtcaagttaggctttcacatttgcttaccaaccttgtaaatggcatgcactgctgaatagtaattaaactgcttaataagggaaataggaaagaaacgaatatttaatacatatctgctacaatccacacactgcttaaggtgactttgtaggttatctcactttatcctcacagcaaccttgaagaaacagaaaaaggaaatgtcatcgtcctaagtcttgtttggaaggagaaaggtctggaacagagactctgttttcaatgagttcccagacctttaaaggggaggtaagaaaaataataatgaaaatatacaaagaatacttataaactgaagttactaatttttaaggcaactctgtatctgtcatttgagattggttccattcattgcaaagaatttaaatcaaaataacaaaaagcaggagaaatctgattgcatcacgatagaaagatgttactttcatggaaacaacttcctaaagctttagatagggtctataatttgatcaaataggagagcaataacccaaaaagaaacagaaccaaacaaaatcttcagtgacatttattgtcgtcaaagatcatagtctagagtataaagttcttttcttgcttgtttaaaattcctgccttatttaatgtaacaaatcagaagagaaagaacttaacataggaaggactgtaaatccctgaagagcttctctgagagcattttcacagatgtctcagagaaagagagagaaagaaattaggatgaatttagtatttttaagaaaactagccagaaatatcaatttgggtactttcgtttgtctcaattccatagatcccgaagcaatcacaggcattagagtcttgttatgaaaccataacctgcaagttttcttccccttgactaggtaggtagaagaatgtgataggatgaatgcatgatgtggacagtccaaatcctgcttgctctacttagtagtagctgagataactcaagtctttgtttctataaatggcgttaatgtctaacttacagtgttactgagaaaattaaagcagatacatatttaagatgcttggaacaagtactcaaaaacggaaaagattgccattaaacacactccttgaagataggataccttttattgtactttgcctccttcagggcatttgaacagagcagactctcaacacatacagtcagttcttgttattctaagtaattatgttctataaagttgctgcagtccaggtgtggtggcttacaccagtaatcccagcactttgggaggtggagggaggtggattgcttgagcccaggagtttgagaccagcctgggtaacatggtgaaacttcatctctacaaaatccaaaaaaaaaaaaaaaaaaaaaaaaaaaaaagttagccgggcatggtggcatgcacctgtagttccagcatcctgggagaatgaggtggtaggattgctgcagcccagggagatcaaggctgcagtgagccatgatgctgccactgccatccagcctgggcaacagagtgacaccctgtctcaaaaaaataaataatggcagggtgcagtggctcacacctgtaatcccagcattttgtgaggccaaggcaggcagatcacctgaggttgggagttcgtgaccagcctgactaacatggagaaaccacgtctctactaaaaatacaaaaattagccaggtgtggtggcgcatgcctgtaatcccagctactagggaggctgaggcaggagaatcacttgaacctgggaggcagaggttgtggtgagccgagattgtgccattgcacaacagcttgggcaacaagagcaaaactccatctcaaaaataaataaataaataaataaataaaatgaaacattaattagtgaatactgaaccaatgctcctagaggaaacatagggctaggttcctatgagtttctggtcacattttgtcaaatgctcaaatcataatcttgttttatgtgtttctgtttaaagacacattatttaatatatagttgatgcattaacactaaactcatggccaatagtgctataccttgtgcctgaagggagtttgttaacatatgtattttccctgcaaggcacatcacagccttcttgtgcttaggaacactagatggcaatttggcactacacttaggggccgttttaaacagtgaaatcaacaaaaagcatgaaagtgcaaaaaccaagtctccaaatacatgcaagaaagccaggttacagtatgagagctaaaacaagaagggagagtgttgtttcattcaacctcagctgcaaacctcaagcaactcaaatttttggcagctctgggcatgcccacaaatgactgtgaaagtgctacaagtcttgattctggagttacaaataaatttagcaagtaggcaaatttgcagacacaaatctgtgaatagtgaggatcaactgcatttgttaaatggatgtataaaaaaaaagaaattaaaaacccatgaaaataggccaaatatattgggatgtctgttcttccaaatcagcttctccctcttaaaaaaaatctttcttaaaaaagtaaaaatatgtataagtcagaaacacacctgttcattgcaaaatggcaagttggtatcaaatggcttttccaatgctgatgaatggtttctaaggttttactgacccattggctaccctctggggtgtgaacagggaaaactagcaaattcacagaattatactagattctttcattaagatgagaaactgaaatatcagcaaggttctggtgactccagaaccttcccaaaatgacctagagaaccacagttactaatcttgcaactgctggacagagttctatttctcagaacttataagtcaagtaatatgcttgggtttagcgatacttttatggttaaaataagaaaagttatacttcatcccattctcatttgtcatctcccagaagttcaacttcagagcccaagcttgaaagaaggcattttggtttcaaggtctcttttcaaagagataaacctgacaactttgcctgcaatgtcagttccaagataaatgagcttatgctattttttaaaatttctgtttggagacaaaaaaaaaaattaagttgttttagaagaaagtcaagggctaatttatggaatggacttgattttcttttatagacgtgagaaaatatactctttgttaatataagttttcttttgctctataagacaatggacacaagctttctgctccccatctcctgggtacccaagagagtgggtattcccctctgcactgtcacatggttccaaaaacaggaaggggaaagttttcttggaattaagattcaaattccataatacagagaagatccaacctcaccattaatgttgctaactgaccacgcccacgtttaacacccctagggtgaaagctgctgatcacttccagttggcttctcttaacacatggaaactgacagtcccaaatgagaagcttcttgtcacaaaatcatggagccaggttaggctctctgggcatgtaacccatgcagtcccacagagtcctgcactcaaaagatcaccatacttagaagggttctgcctttggtttaatgcactgacactgcagtcttaaaattctcatttttctttttaacaaggatccctacattttcttactgccctgggccctgaaaattatgagcctagtcctgcatggagctagttagtagctgaggaggattgcacagactccttgtccaatacttctcccacctatgctaagtgacctgacgtaaggtctgcgaaggacagtacctcctctgcaactatgatagctcacatacgcagacttctgtatggtgtcaactttgtgcttcagagcatccatccatccatccatctgcctagggcacgtcgtgagccaatcactcatgcactcctagcatcaaacacattggaatcatagcctgagctctgctaggtagaggatcagtttatctttattaagagaatgagctaacagacaggcaggttaggaatacaatcttttcttggataaatagagtggacttcattcactccagctgcatcgtgtggcatattttatgcatatgtatttttataaagcaactagagaaataaagcaatcttatatcatctaagaacaacaatctgactttctatttggcaggctgccctgcaatccttcctttctcagctcctccatctctcttccaggctccgggggccgcctccctcttgtccccattactttgcacaaaggtgaataaatcaacgtgaagctcttatcatcttattttctctctgctcccttctattctgtcctcccaatcttgaatggtttgagagaaattaatgcctgtgtctctggcaaatgtattgcgcctataattcagttttaaaacaagcataccagcagtggccaaaccttgggtagaagattcatttttcacatgagtaattggatccttccattcaattttctttcaagtattaaagacaactgatgcctcactgaaaactcctataaaatttctacgaacacttgtcaactgagggtagggctaccctggagggcaggtggtggcactggcaaagcattttcctacagttcacaggtagaaggttattccaaggtagtaaaagtaataagaaatctttatttcatcagcctccactttatgccatcaatatttctgtaaggttaaaaactcagctttggtgttttcttaggtgacaacattattggatttaacggacttgttcaactaatacaataaacattctttagcgattgctttactgtgccagggtttcaaaagatgcttgtattaagaaacatctatttggtctgtcagggctacatttgtgtattttaaatgacacatcatctctatagtgttttttaatacaacagaaataatgtgtcttactacttaatggttaaacatccagcaactgcattttgcagaatgaaattcaccatgatattggatactgggataaaccctttgtgtttacagatggttattctactttttttgcagacaaatttatttcagaattgactgaaatggctcaattactgactgactccaagccatcccgattagccacagaagtgatctgaccattttgcaagtcatcaaggttgtctgttgctattttcatagtagcacttagaaattcttagaaattcattccgcttaccccggttacccaacaattgtctaatttttcacttctgatgcttatcactaaccccttctccctggggtattgaattctttagaaagtaattgtgggccacctgtccatgtcttcttctgtaatgggaaatgaaaaccgaatgccagcataatactctgacccacatttctgaccactcctgaaaggtgagaacattaagagactcaggcaagatcccccaaccacatcatctgcttggaaggaaaggaagactgtgcagcatctaccaatgaggaagtcccaggtgttttggttttgcttttcttttcaatcaagatttggggtaaaatcaggggacacgaaagcaggagagcctatctggagaaggaagaggatcatggaagagtctataaaacaaaatctatcagaaatctcttggccaactaactgtcatgtactgctgtttaacaaagcatccttaaacttaatgcttgcaacaatacaaaacatttatttgctcataattctgaaatttagaaagggctcagctaagtgattcatctgctccatgtgatatcagctacagtcactcatttagctttagttgacggagaggtcagctggggctagaatgatatcgaggtggcttcactcacatatctgggtcctcagctgtggtggctgaagatctgggagctgtctgggcctctcctcagcagggttgttgaattccttatttggtggctcagggctccaaggtgagccacagcagaagctgtcagggctctaagtggctaagcctggagttggcacaacattgctgctgccacattctagtagctgatgcaaatcccaaggccagctcaaatccaagtggagtgaacataattagattccatgattccgtatctggatggggtaaatggaatgcacaaatatgggtgggagaaatagttggcatatctatggagacagtcaaccgtactagctcccaatgtttttctcaaccctagcgtggatgagggtactaatggtcagctcagggagttagtggtcactctccataatttcacttcacaggttagagacattggcaaagaacatctttttctttaaacatcactgcgtgtttgttattggattctcatttcaaattgacttgagcttcagaccagttctagcaccatgagtcaatttgtaagtcaaacaggcaacttgtttaggaatcagagcacatgattcatattcaagcaatcaagcacaaagaagacaaaacaccttatttatgctgccttcctcaattcgaaagagacgttagcttccaatgtcacaggaaaaggaacatgtcagtgaaatttccatagacaatagtattaacacatgatttgtcgttgagcttctaagagtctgaagggtcctcagaaaaaaattctgattttgtatgatctttaacttctttactcattttagaagctcaccaccaaccatgtaagatgagattccacccatttgctcaaaatgtgtcactagagctacaaagagagggtgctcctgggcaccccagtttgggcttagttagtaaataagcctaaatcccctctctaaaacatggtttagatttgcagatcaagactgatagacttctcttttgtgttccaacagaaagtagtcccttgggatccaccttaggtataaataaaacatatttttgtgagtgagaaagtaaacgatttctttctaatttctgattgacctctgattcctaggcttttgtgacagatcacaatgtcttcaagcaacaatctataatgttctagtgttatctgtgtcactgaccagcagcttgacactgggcagggtggtttttccctttctgagttcttgccaaagggttcagggttaaacattaaaggtgcattaaagctctagttagtggaaagggttaaatatcatcatcaaattttactcttgcaaaatgtttcacaggttccaaagcattttgtgtaattgcctcatttgatatcaatttctagggttccttccatcttcaacattgtatgatttgatggactaaaaatgcatgctcaattgataaaatgtacctttttccagtagtttaaatagtcaaagacttttaagtgctcctgctgtggagaaagaaaagtctgtttctttcatctctgcatttacgttggaagaccagatatcactttcaaaatattttttcaaaacttaaggagaggtgtgacttaccacttaatgatcagcctttgctcacacatttctgtggttcattgagcgaacttcactgtagaacaagagtctcctagagaaaaagcattcaatctatcttcctggaagatcttggcattcattccccttaggggctacccaaaagagcaaaagggaaaggcagaagggatctctgggacctcacatccttatttaagcagagaaactccccttttatcagtgttcattttcacttcagtgtaaaatttcatttgaactaggagttctaaggtcatcaaatatttgaaaactactgcttaagggaacacatgtggatttgtaaatcctgctaaatctatttatgtattgtgatataattctccctactgatgctgtaaaaaattgttttaaactgaaagctatgatataaactattccaactgaccccacatatccccaaaggcctcctttaaagttctactctgtggtttgaatgagtttttgaatggatgccaaagatttcctatctcctctgctaaagaggctaagactacaaaagaagccaagccagggggaaagaaaaattccagccataaagtttcaaagaattctcagatattaattctgacccaagtgccagagtgattcactggcgggtgatgctgagtaatcttactttggactcttaatccatgttctattaatggattttagccacagctcaaaaggttaggaattaaagaccccatttccacctctttttattaaattattctaacctcatcctgggtaattcatcactgtctcactcgctcttggtacacacattgggaatggaagggccagttgatacaatcaccctgtccaccttcccaaacacattctaataaaaaaagagccctaagtccagtttctctgagatttgagagggtggttattccaattttacattcagtactgctgaagagtcagttcctagagactcttgctccttaaggagtctctttctttagtagaatcataccctttgccttagttttggtaattttcaatgttgtttaggttgagcctttgaacatcgtgaccagatggtcatctgttggcagtttccatagcattcgttcagtgggcacaaatcttgaaggctacttgaagaaagaggatgaagttcagatggttcacacacctccagaaacctctttcaactgtgaacaatcttgacttgctgtggtttctgtacatgtagtaaagcatgttgaaggaatggatgccttgacttcattgatacctggaatggacggaattatatcccctcaaaattggtaagttgaagcctcaactctcaatgtgactgtatttgaagattaaagggcattaaaggaggttattaaagttaaatgaggggtcgggcacagtggttcatgcctgtaatcccagcagtttaggaggccaaggcaggtggatcacttgaggttaggagtctgagaccagtctggccagcatggcaaaactgcatccctataaaaaatacaaaaatagctgggcatggtggcgtgcacctgcagtcccagctacttgggaggctgaggcatgagaatcacttgaactcgggagaggtggaggttgcagtgagcagagattgcgccactgccctccagcctgggcaacagagcgagactctgtttccaaaaaaaaaaaaaaaaaatggttaagtgaggttggaagagtagatccctgatccaacagaattggtgttcttaaaggaagaggaagagataccaggagtatgtctgcacagaggaaaggttgtgtgaagacacagagagaaggtggccatgtgcaagccaaggagagaggtcgcgggagagaacaaccctacccatcctcaatctcagacttccagcctccagaattgtgagacaataaactgttgtttaggtcccccagcctgtggcactttgttatggtagcctgtgatatttcgaaatatcacaggctaccatattttgatatttggtcttcctgtttcctggctcatcattcccaaaacccttggaatctaaagcaataaatttctttgtgaatgttaatgagatgactggtggctgggggctcctggatagcctcaggatgggggatggttgccaggggaatgttgtaattagagggttgaaactttcagctcccccactaccaccacacacacacctctggggtggaaagaggagctgaagattgagttcatcaccaatggccagtggtttaatcaatcatgcctatgtgatgagacctctacaagaacccaagactgggttctgacagcttccagagagctgcacacacagcagttcctggaggttggtgcaaccagggatctgggagctccaaaccccttcctacatacctcgccctatgcatctcttctatctggctgctcctctgtatcctttgtaatatcctttgtaataagtgggtcaacataagtgtttccccgagttctgtgagccactctagcaaattaaacaaatctaatgaagcgttcatggaaaaccccaatttatagccagataatcaatcagaggtatactaatcgcaacaagcatttaaagtggggggcagtcttgtgagactgagcccttaacctatgatatctgatgctgtctacaggttgatggtgtcggaactgaattgaataagacacccagatgatgtgtgctggagaatgtagtgtcagaagtgttatatcgagagatgtgtggaagtagagaaaaaatatttttttttctctgacatagcccaagcagactaatacagtgccacaacttcaacatttggaatcagtctgaagaagagaagtttccagaagacattatggctgtttttaaatatctgaagacagtgactacttttaggttggtgcaaaagtaattgcagtttttgctattactttcaatgacaaaaaccgcgattacttttgcaccaacctaatacatgcagaatcagatttgttctctgtgaatctagaaggaaatctagaactggttggaaatgttttaaaaaataaggaatttgtctcaatgataaaaaaggaatttttaactgttaaagcttttcaaaagaagaatgagaatgagctacataacaaaagtgggtaagatcccatctcataaataaccatcgatctggattccgaagcatcacaaagaatgttggactaccaggactctatgatgacttttaagtggtaaaagtaggattttaaaaccctctcatcaagggttaccactaagtagctcattatcttgggcaagttgcccaaagtctcttcatctcagtttccaaaaatctttttaaaaagaaagtacagtttttgtgaaaattgaaaagaatatattagtaaagcatcaaataaatagaaaacattatcatcatcatcatgccattggtgtcatcaaatgaaaatattccaagaaaagaaaaaatatataatgctttccattcatatgatgaaaatatatacattttttcttactttgggtttgctttaaaaatataaatataactgtgcttctcatgaaaaggtaatcatataaaaccattaaaaacccaaaccctggaagtttgccttacatcataagaagaagagcaacaaaaagccttagtgaaactgaacagagtgttctcttttccctgatgggtgagatgcgatctgcacaagctgtgagtgtagagaaacaaatgctagtccttcagctgtaggggtctgggacgaccttcctaactaaggcaaaactgccttttctgtgagtcaccctttgaaggaagggctcgctgcctgggagcagttttactgtttcacatttctttcattcatcacttttcaggccctgcgccgtctggcacagccccagcctctttgtgtggatatctggctctcattgctgcagagaagtgatgtcaggaggctctgactcaggtgagcaataaggagcagatggcgcctccacaaacccagagcctctccccgcaccctgctccttggaacaagagtaattattataaatgggatgggtggtgggataagcaaagatccaagttttctaagaggatctgcaaagctgaaccctccaggaaaaaaaaaaaagtgcagccaccagcatggacaacagaaaggaaccctgattggagattgtttaggaacatggtgctcactcaattgggcgttgtgctaatctgattaatgaaatgacgatgctaagcggggcgttcagcttgctgcatccgtagctaaggcaagttgggcaattccccccagaacatcaattctcagcacccttgtcagataactgtttatgaaaagatgaatgcacgtggcaatctcgggtgaaggaggctgatgcatgtgttgttaatgattgaaataatcagtttggtagtaactggcatgtgcgcttgtcaaatgacaggctggggagcattagcattcctcaggcatggacgcctttatcttcaggctggtgtctgacaactaccaagatcacccatgaataaatatcgggccttacccagacataattaaactgccaatgcagatatacctaaataaaattgatatcttaatgacaccagatagtgttcaagtaatgaaagcagtgtgagagggacctgcacaatgaatggagacatcagtgctcattccacaggggactcttcccccagtaactcctcacagaggttgcttctcatcgtggtggagttttatttctggccttttctcttcgattggcctgccttcaccatctgagaaatctttccttctttctccctagctataccggagagctatgtatctctctgcatggaagaggtttgtgtatcttttgttacactccactgggccacagagattttggttttgtgacatctgaaataaccccactatgcttaggacaccagtgtttgctgatcctggagctgcggctgcatcacctcctccacggagtcccgggagaaacctccgttgctcatgtctgcatcactcagtacatccagcaaaatgctaaaaagcatcaggtggtaatctcagcattttcgggggccgaggcgcatggatcacttgaggtcaggagttcgaaaccagcctagctaacatggtgaaactttctctaataacaatacaaaaattagccgggtgtggtggtgcgcacctatagagtcccagctactcaggaggctgaggcaggagaatcgcttgaacccaggaagcagaggctgcggtgaaccgagattgtgtcactgcactccagcctgggtgacagagcgagtctccttctcaaaataatttaaaaaaaagtaccaggtgaatctgatctccagcctcttgccagctctgggggtcgtttgagagagagagtgcgtatgtgcatttatctgactaatttccacctgtccgccctctctgacttcataaaattgactgtctaccacgtggaccaactcctcaccactaagatgcaagcactttcatcttatctagtcctttatctttatatgccactcccaggaaaaaatgaatctgcctctgaaaccatttctacaactccttatcatgtttcttttttctttttctttctttcttttttttgacggagtctcactctgttgctaggctggagtgcagcggcgtgatcttggctcactgcaatctctgcctcccaggttcaagagattctcctgcctcagcctctcgagaagctgaaattacaagtgcgtgtgccactacgcccaggtaatttttgtatttttagtagagacagggtttcaccatgttggccaagatggtcttgatctccggacctcgtgatctacccgcctcggcctcccaaagtgttgggattacaggcgtgagccactgcgcccagcccatattacgcttcttaattgccgttatcttgcagtagatttttcctactgatttccctatggaaatggcaccccctctttcagcctctctctttaactacctcctttgactaaaatgtgattattcatagacttaatttgctcacctgaaaatcgctgaagttggacaagatcatcatttctcaaactgtgtcctctagaacaccaacttttcgtagtacagtgccaagcagcagttgttcaataaatatttgttgaataaatgaaaatacttgtgtcatgataaaagggattctggagacaagtgtagggagagctgagaaaaatgtgtttaatctttactctaaaacttttcagaccttccgatgggctactaagcagtataaaacttcatatggtatgcaacttttagcaaacttatttaaccatggaatttcatgttttgcagttgcctaggaacccgtcacagaatatacattagatttaatgattaccaaatttcttttggctattaaattctatgaccacatgtcttacacagagacccatccatcactcccattcacctcaagggaagaaaataagtcttcaacttcatccctccccatagcatctaacactatgtctttccttttaaagtcctgtgatcattaaaaaaaatttggtctttgtccccagttcctgacacagctcctaaagcccttggaattttgggagtaataagtgccttttgcaagtaaatgtgatgactgatggttggggggcccctagatagcttcaggggaacgggttgccagaaagaccaacgcaccattagggagttggaacttttagcctcaccctacaacctccatggaggggagaaagggctggaattggaactaatcaacaatggccagtgatttagttcatcatgtctatgtaatggaacttccataaaagcccctaaacaaccagggttcagaaagcttacggaggtgctgggaggctgtgcacccagagaggacatgggaagatccatgcccttcctccacaccttgccctaagcatcttttccatttggctgttcttgagttgtattcttgacaataaactggttataataagtacagtcttttttgagttctgtgagttgttctggcaaattattgaacctaagaaaggggttatgagaacccttgatatttagccagtcagtcagaagtacaggaggcctgggacttgggattagcatctgatatggggcagccttgtgggagggactgagcccttaactccagggataggatgctaactccaggtagatagtgtcagaattgaattgagttgttgaacacctacttggtgtctggagagttggagaattggttggtgtgagccaaaaaaaaaaaaaaaaaaaccacacgtttggcgtcaggtatggtgttattaaacacagcacagtagtcctgattatttaaatatactaaccaagtctaaattctcactttcacactctcatggtttccagtagccattttcattgtctgatgactttgtatctgtattacttctctaaattgttacagttactttgggtagctataacaaaataccacagacaagatggtttatacaacaaatatgtatttctcccagttctggaggctgggaggtccaagatcaaggtgtaggcagattcagcatctagtgagggctctctccctgctttgtaaatggccatattctgtgtcattctcacatggaggagtcagagaaacccctggtctcttcttttaataagggcactaatcccgtcatagcatctctactctcatcctctcacttaagcctgattatctactgaaagtgctatctataccaataccaccccatggaagataagggcttcaatgtatgaattttgcaggaacatgtttagtccattatatccaccatgtgtcttaatatcttagatagtgttcagattaacaaaccgtctctaatcctatcccccagtctaccatattcttagacttcactggcagtctccactccacatgttgagaggtgaagctgactgggcttctgggtcgggcggggacttggagaacttttctgtctagctaaaggattgtaaacacaccaatcagcactctgtctagctaaaggttttcaaacgcaccaatcatcactctgtaaaaacgcaccaatcagcgttcttgtgtctagctaaaggtttataaacacaccaatcagcactctgtaaaaaatgcaccaatcagcgctctgtgtctacctaaaggtttgtaaatgcaccaatcagcactctgtaaaaacacaccaatcagcactctgtaaaatggaccaatcagtgctctgtaaaatggaccaatcagcaggacatgggcagagccaaataagaactaaaaactggccacccgagcccgcagcagcgatctgctccggtcccttgccacactgtggaagctttgttcttttgcttttcacaataaatcttgctgttgctcacgctttgggtccgcactacctttatgagctataacactcaccacaagggtctgcagcttcattcctgaagtcagcaagatcacgaacccactgggaggaacaaacaactccggacacgctggctttaagagctgtaaccctcactgcgaaggtctgcggcttcactcctgaaatcagcaagaccaccaacccactggaaagaagaaactgcagacacatctgaacatccgaaggaacaaactctggacacaccatctttaagaactgtaacactcactgtgagagtccacagcttcattcttgaagtcagcaagaccaagaacccaccggaaggaataaattcgggacacaatgtcatctacccacaaaggctcatagttgttattgcattgcactgctcagcctctgagctctcttccttccttctgtgtaaaaatttcctcttgccgcattcctttgttccaccgctgttcgacaatcctctgacctcagggcactttcctgaacactgatgacttccaaagcactaagtccactcatcctcttctgatggtggttgctccccactctactgggctccagcactggactattggacatcacctagccaagccccctaaacccccatacagacttaacatggttccatgccgactgtcacacaggaagctcttcagccacgtgctttgttccttttagcgtctaagaaaattattgggaaaagtcacgaaactagtttattttagttcgccataaagagttgccaattctcataactgaattagttattgtaccctgaggaaccttgattcatttcttattgataaactttcctttcctgtagacccactatctccaaagtgctgacaggatactgataaatattctatggaaagaaggttccatggtcatatagatattgggggaatataaggctaaatttaaataaacttgtctcatttattctcagagccttaaaacactagcatgcattgtgaatttgctaaatgttgtatatgcaacaccacacagcatatacaagtttatgtgataactgaatccgtttagtagtagtaatcattttgttttgttttgttttgttttaattttttagagtgcatggactaaattttgaatgactttagtttaaattttcttttcaggactcatgacagaaaggttcactggctgttcacccagcctattccctcttcttcctgagaacacagctacacctcatttgccaacctcccttccagtatggcataaggtgtgaatgacctctggccaaggaaattacagtagagatgacgtgcattgcttcttagtctggtctttggaaacctccctccacacacgccccccatgttcttttctggttctggctgctggaatggagctgagcccctgagcgatcttagaagcatgtgctgtgtgaggagcctgggtccctgaatcaccacttggagctgagtcacctgaccaagaacgcctgcattgtcagttttatgagtgaaaaataaactttgttatgtagacactaaaatttgaagatatattcaggaccgagattaggataagacaaatgcggtacttacttgctttaggtgcaaaatggaaggcaaacaccaaaacaacaacaacaacaacaacaacaacaaaacagatataaagataaacaagatgcgatattttttaaaaattcaaatcaggcccggcgcagtggctcacgcctgtaatcccagcactttgggaggccaaggcgggcagatctcgatgtccgaagatcgagaccatcctggctagcagagtgaaaccccgtctctacgaaaaatacaaaaattagccgggcatggtggcaggtgcctgtagccccagctactggggaggctgaggcaggagaatggcatgaacccgggaggcgaagcttgcagtgagccgagatcgcgtcactgcactccagcctgggcgacagagcgagactctgtctcaaaaaaaaaaaaaaaatgaaatcaattcaaaaaaatctataacgagtaaaataccaataatcacgaggtcaggagatcgagaccatcctggccaacaagatgaaaccccgtctctattaaaaatgcaaaaaaattaggtgggcgtggttgtgtgtgtctgtaatgccagctacttgggaggctgaggcaggagaatcgcttgaacctgggaggcagaggttgcagtgagctgagatcgggccactgcactccagcctggcgacacggagagactccatctcaataaataaataaataaataaataaataaataaataaataaatataaaaataaatacaggatcaccatttacttgctacagcagccatacccagctgacagaggtttccaacactcacacagcaattgatagataaacagtcccaccactgtggccatatcactgtcctgttcagaaggggttactagatatctcaaaactgcccagccagagttcttcacttttggctctaaacgattttccctgcttaaataaatttcattccaagaaaaaaaaaaggggggggggtatttttacgttattttgaataaattgtattcacttacttcttcatgcttgtcctcaaacagcttcccattcctagaatttcattcttgatcatcttcctgatcatatcaaatccttattagttaaggtccaatgacctcctgtgtgcaacttgaccataatgatttgttttccacgcatttggtatttccttgtggcatttcctcttcctcttgtatgttttttcttatataatttaacttgaggattactagctaacgcttcagatctgagtctactctatctaactaagctgcatgctttgtaaaaataggaaccctgtctgaatcctctttctattcccacctgcacaggacactgatgggcacttactgatttgatttacacctgattttattgctgtgtgactggcaattgctgtatttggttcttgaacactttatttttttatttttattttttgagacagagtctcgttctgtcgcccaggctggagtgcagtggcacgatcttggctcaccgcaacctccgcctcccaggttcacatgattctcctgcctcagcctcctgagtagctgagattacaggcacacaccaccacaccctgctaattttttgtgtatttttagtagagacagggtttcactatgttggccagactggtctcgaactcctgacctcgtgatccacccgcctcggcctcctaaagtgctgggatcacaggcgtgagccaccgcacctggccggttcttgaacactttaattttcccttggctgaccacaatactgataacctaagcaccaggcatggcagggcaaaatacgattccagtgttgatcaatacagcttccccaaggaagcattctcaagggcaacgtcaaagggggattcagaggaggccgtttctgcctcatcttaggtggctggctttggctctgtcacctcatttctaagtttacttataaagagaatccccatgtatacagaaatacgtctttctccagaactctgcctactggttggaggaacagtgctgaacccaaaatgattaactgttttaggcaaggctggagaactttttcaaatgtaaattaagacaaagaaaggcacagctaagacctttcccaattcagcatgatcagctgcccttgtgcttgagaagtggaaatggatgtggtatactggagaaaagtgattcccacttttcacattttccattgcatgcacattattggagccttgaataaatcaagtcaagaacttcttccctctctggtagacttacagtcctcccctttaagcaagaaggagaattataattgactgcctagaaaagttgcctgtagtgccatttggaattctagtcccctgggtctaaggcttcctggtctttctaggaccatgttagttaaagcttcttttgtttttcatggggcagagtctacaatgtttttcatggggcagagactacaagaattgctttggctaaagggtgcaaacaaaatacaggatcccagtaacaaatgatttcactgtgtctctatggctaagtagagagctggagtcattcctcccttcagctatgacagtgctgggttgaggagaggtgttctgtaagttcacaggacaggaagcgctgatgccccagcaggtgcagcattggggttggccatgaagaccgccatgacataccttgtgtgagagaagctgcttgcagaaaggagtgggtcttgtggctgcattcaccaatggtttaagccagaagccatcattgcactggcagctttaaataacagcatcattacagacctctttgatgaggatactgtgccttctctcttagttgaaacaactaagatcttctctacccttgattttgttggggtcctcaagacctgtccagattagattacattctaaataaaaaatccatatctcaaattctgaacagcagttcaaatcccctgaatgtcttcgatttgattccttaccaatcaaacacctgtccacatcatcccttgttttaaaagcttttcttctgagatgcccctagccagctaacttactcttttctggcaactcctagagttctttctagacatgtgaaataatactagtttatcaaaatacctttttttaagctcatcatccctaatccccttctctcacacattctcccctctcaggtacttcctttgaaatctgtaagtaggcccctgacctaactatccacatcttaattaaacttcccttaaaataacatccaggaggaattttattccactgatactgcttacagataggagctatagagcaatagacgatctaataattgtcctataaaaactctagacaggagtctgcaaggaaaattagacacaaaggtaagggagtgatgccactgatatcatcaccaggaagcatgagggccagagactcaaaaaaagtcacagattcagaaggaaaaagagcatttttgaaaacttcctgcctcataagcaagacattcgattgtaccttttttctgagagtttctattgagtggctagtctgtgttctaggcagaggcttggcaagactactggtccagttgcaaagcctaaggccaaaacctggtggtttgagtagctctgagccttccacggattccagaaaagtagcaggaaaattcacagcgctcaggaggtaattgccagttattgctctactggttccaattttagtagcaaatgagcaatgtataatgtatcaagcttattaaaaaatataaatgagaaataaaagtgctcacaaggggaatgggaaattcacaaagttttacaagatacagtcattaccagagctgacatctgacagccgctaggccctgtgcggtgctgatatctctgtgatgccttgtaggctatgtgctcaaggcagctcagtgcaaacccctgaggggtgcgcagctgattattgcctttcttgttgaggggtgctgactttggaactgttaagtccccagacctaccaaggcaatctagttcgaagcatgctcagcctccttttgaaagagagataaagcaaaggttttgtctttcaagcacgaagaggaaatgttcatccagattttcaaaacctgcagggttgggataagatgccatccctgaggatttaacagataccaccttcctccaccataccctccacccccaacaagtctagtaccttattatcttgaaactaaacgatggtaatatccccataaattatctccccacaggcagactgccccctaactctattccaccctatgtcctggtgtgccaaattagtattcctcaagccccctgagaataatgtcacttaacctcattcagcagcacgtgcctgatttgcaaataactcacagacatttcagtctagaattcaccattttcaccaatggtgtcccacgctacctacctcgtcggtgttctcacccactactccccagcggtgacccccatttctgctgaacaaaaacacttatggcttcctgagcacagattacacccttatgcctcccgctgggtgggccttttctgcctggagttcatcctccctccattccactccaggaagtctttcgcaaacccttgtttttataaacctaccgtgtttcaagcagtatgggaatggaacaggtggaggaagaaatgtaatctacttttgtataaaggggtgtcgcattcaacattaaacccatttcacttacacagattcaacttggcaatggggagacacagcacaactgaaatgatgcaggcaatttagcctggtgttcaactaggagcctgtgtcctagaaaacagaaatggggctgagactcacctgtcttctccaaggtccccagatccctgagggccccttagagtggaagcatcttgcctcaaaaccatcctagacttgattaaagagtttctcaagtcgatgttagactgtattaagagcttacttacacgtggagttttagacctaacacccaaacacaacatgatttctctacatgcacaaatatgtcattttttcataaaataataaaaatgcaaaagatgtttataattaacagaaggtgctgagacaatcatttaactacttgagataagaaatgaagctccagcagcacctcaaaccacatgcaaaagtcaaccccagatgtgttgagttaaatgtgtctgagagtatattatattacatataagaacttgaaaacagatgaagtcattcctgaagaactgttttctaagcataaaagcaaaggcacgaattatgaaataaaagatacctttggtttcgttagatttcctccttctcttgtctttctcccaatcttatgcaaaatgacctaagaagaagaaaaatctgggaagcccttcttcagtactgagccctagtgaagggtggcatccacattcagctttgaggaatcaagttaaaggatgacacctagggccatgttgcacagatataataccttcccgaaaacagtatgtgatgtgatgaggggctacaccagaaggacttcaatctccctagatttggggagaattagaaagcaaggcaaagccggccgggcgcggtggctcacatctgtaatcccagcactttgggaggccggggcgggcagatcacgaggtcaggacagggcagaccaccctggctaacatggtgaaaccccgtctctactaaaaatacaaaaaatcagtggggcctggtggcgggcacctgtagtcccagctactcgggaggctgaggcaggggaatggtgtgaacccgggaggcggagcttgcagtgagccgagactgtgccactgcactccagcctaggcgacagagcgagactttgtctcaaaaaagaaataaaataaaagaaaataaaataaatagataaaaaataaaaagaaagcaaggtgaggccggtcatggtggctcatgcctgtaatcccagcactttgggaggccgagtcaggcggatcacgaggtcaggagttcgagaccagcctggccaacatggtgaaaccctgtctctactaaaaatacaaaaattagtcaggcgtggtgacaggcacctgtagcctcagctactcgggaggctgaggcaagagaatcgcttgaaaccggaaggcagaggttgcagggagcagagatcgcgccactgcactccagcctgggcgaaagagcgaaactccgcctaaaaaaaaaaaaaaaagcaagatgaaatcagcataaacagaaatgcactcagaaactcaatggcagccatgcttgcacatacttgcacccagcagaatatcctcaggacagcgaacagattccctgaaagagcaggtaccagaataggcaataggttcgacacagtcaaattgtatagccacagagatggcttagctcacccaaattaaaacaaatgagaacaacaaacttccaacaaacaaaaggatacatacaaagcaaacatctagcccagcagattcataaaaatgagcacgggtcggacgaaggcccagaaatgtttccttaatggatgccctgcgattccgcctcttttcccctcttcacagttgctgaatcacttaataagaatggatttttcatcagctagacctcctgtttatctgaggcgaatcacacactctactttttgagcaaattaaaggcctgagtaaaacccttgaacatttaagcatgagtcaacagacatcagaaagagaagttacaaaattaaaagaaaaagacaacctctaaagagaaagagacaacaaaggcacctttcagagggaagaaaaaagaagatttgtaacaacaacaacaaaaaaacccaaggtaagaattaagtgatacctgtccaatactctcactaaatgtaaatatggacttcatcaaacagagatgaaattggaaatactaagaataaagaatagtaagaataaagacaggttaagaagcagctacttaagaggtgagcaggaaaaaaggacaggtgaactcattcaaagaaactgaaaatacaaaagtagaaaggttaagtatcattgtggaggccaagcttgaagccatctcctctcaagctgcagagaaaagctactcagatatgggaacaggaagaggagcagacaggttgagatcagagaatgaagctccacaatgtaggtcattgaatgttttggaaaaagatctcaagacctggaatcctcagagaaaaaatgttcatcgttaacaaaattgctgaaaagggacaagcatttgctgtgtcctggtaaacgttttgaattttaggaataaagacagaatcctgtaagttacctaaaagcaagataaaagaagtggtctaaggcctttacttaacaccattaaataccataagacctgggagcagattccgcagaaatctgagggaaaatatgtatgactcaggaaagctatagtccaccaagatttcatttataggacaagatttaagaaaaaaatggaaaagccaggcatagaggctcgagcctgtagctccttgctgcttgggaggctgagataggagaatcccttgagcccaggagttagagacttggtgcactgcagttgtgcctgtgaataaccattgcacaccagactggacaacatagtgagacactgtctctaaaacaaacaaacaaaaattggatgtgcaaaaaattgtaaatgttgaaaacattactttctactatatacatatggtattatttataatatatataaagtactatgtacttcaataatacatagataaaataaaaatttcaaagatcaattatacaatttaaaaacaaaaacagtagtgatctatgctatatgtaagtaataaaaaattcaaagtaagaaagcaaatgataaaaatgttaaaaaagatgattatctcgagcgaaggaaggcagagggtggaatctgacacaggcacatctgcctgtaactattccagttttattttctttaaaacgatctctatctatctgtagctatgtctgaaacaaacaaacatggcaaaatatcaaatctggcatgtgagaagttaactgtaccatttgcagacttaatatattgtacatgctttttaaagaactgaataatgaagagattagagactgcagagttgcatcatcaaataagctaaacacggaagtctaaaaaattgtcacaaaaatgtttacgaaatgccagtgtaaaaaatagcccttgaagaaaaaaaccacaatgctactgaaaagtaataataaaaggccaggtggtagattacaatggtttaaggcttgagctcaggaataatactgctctgtgctcagattctgactctaccacttagcagtgatgtggccttcagtaagttacaatgcctgtctgaatctcagctatgcccttgtacaaaggctaataataatacctacctcatggggaaattgtaacaattatgtaaaacaaggaatacaaatctggaacactgttgtgtaaaacaatgaataccaatcagcctggagcctggcacatatgagtattcaactaatattaactgttagtattattatgacaacaaaaaaagagactgggtggagatgctttgttttactccagtctcttagcacctcagctgggggctaccacccaaggcaaatctggaaaaggtaatttcgtattaatggacacacctcttcaagcatctagaaattcagacatttatgtgtccaaactctacttctacactcttcttacacctaaaagtaaaaatatttttgaaaatataatgtttttattacatgtgaatatatattcaattacatacatatattttaatgttctatataaaatttaattatataacatattacattaattacatattagatataatcttatattttatgatataattttatttatattatatattataaaagtttgatcttgtattatatgtttaatttattattggctaatttatttattattaaggtcttaggcaattgattatctttaaagtatccttccccttagaaaactctagaaatggaaatgaacatgttcctaccaaattcagtgaacagcactttcttcttcacattccaggtacaggatggaagcacaggctatccctaaggcaactgaggagactgaggggcaatgtgtaaatacacatttttattttattttattttattttattttttgcttaggttgtacaattaatatttatttttcaagcagcaagtttggttttggtttttttgcaaaaggcccatcttgttttcttaacaattctttgatcctctaaatttatattttgaaaattttcaaagttacaggaaaggtacaatagtaagagtgtattggccgggcgtggtggttcacgcctgtaatcacagcactttgggaggccgaggcaggcagatcacctgaggtcaggagttcaagaccagcctggccaacatggtgaaaccccatctctactaaaaatacaaaaattagccaggtatggtggcacatgcctgtaatgccagctactcgcgaggctgaggcaggagaatcgcttgaacccgagaggtggaggttgcagtgagccgagacagcgccactatactccagcctgggcaacagagggacactcgtctccaaaaaaaaaaaaaaaaaaaaaaaaaaaaaagtgtattacctacatactcttcaactggagtcaccatttcttttttcctgccacctttgcttctctgtgtgtgtgtaactctatatattctttctgaactgtaacagagttaaacatcatgacatctcacctcaaatacttccacgtgtattacctacaaacaaaaacattctcctaagtaatcataatacaatcatcatactcaggatatttaacatggaggaaaacaaattttattacagcgtgtgtctggatttttggtttggaatatagagtttcttttagtctggataccctgctgattatgcctatggtaaagtgagctgactaacaatatagctccattactaaaaatcatgagtaaatatctctaaataattaactattgcaattccattttgatcaaagtgcaatttcaacacaggtgcctgatagagaatctggtttggaactgaagtacttagtacctcaggaaaacttattaaaatgttttcttcttgtaaaagacaggggaagcaaagtgtgggaaattaaagtgacattcctgaagtttacagaaggaaggttggtaaaattcaaacttaagttccagcaatactgtacagcaaagcacagatcctgacaccatgtagcctatgggagaggtgggcacagaagatccagtaagagaccagaaacacattgcttccatctccctcatttctgtttgtaacacatctcagccagaggcctccattcctcgatggatgttagagtcatcttgggagcttttaaaagatgcagagatgccttggagcctacctcagaccaataaaagtagaaatcactggggacagaacaaggatgctggtatttacaagctcccaggagattctaacaagcagccagaattgagacccattgccctagaggaaaggaagtttggactttgggtatggctgtgtattcttgtccacccctacctaagtctcttgccttaggaagtgacactgcactgcatttttccttccctctgctcctgattttcttgtgagcattcgagcattcaccctgagataccagatcattctttttttttttttttggagacagaaccttgctctgtcgcccaggctagagtacagtggcgtaatcttgactcactgcaacctcctcctcctgggtttaagcgattctcctgcctcagcctcccaaggagctgggatttgggattacaggcacctattaccatgccctgctaatttttgtaattttagtagtgacggggtttcgccatgttggccaggctggtctcgaactcctgacctcgtgatccaaccaccttggcctcccaaagtgctgggattacaggggtgagccactggacctagccaccagaccattcttaaatgcattgtccacaatgtgtcagacctcccaccaggctggagacactgcgggattccagcaggagatggacgccacacccaactgcaggcacttcactcacacaagcgcaaaatgacagagctgtgaattgtgccagtgccaatgtccggatcccaggggtacaaagaggacagacaaagggcaaaaagagagtgtagggtacggatctgtgtggtgctgaaggcggcttcctcagatgaagctctcagtggtgtgggctgtcactgggcccaggagcttagctggggaagaaacctgtaattgacaaagtcacgccgcccatgtcccttataaacggttgaattctcaagcaaagaccagcgtttgtgacaggttacaatacctgactatgtgaataaataacggatatacctccctcttctttcccttctccccatggccatgaccaccctgtctttttggaataggcaagcagtaactttggctctgtctctaggaaaaaggagccgcagcctgcaagagtggactgagcttccatcacatgccaggagatgagtcagacacagtcatggtctggaggagtccaggatcgctcattctgcaagaggcagggacagacgtgtgtgccgtggacagacagacagcctcgtctattctgcgaacatttcacatcctgtcaccagtgtggctgctcgggcacacacgagggacagcgggtgggggggaaagtaaccctatccaattcctgacattgcagccccctcacacccgctctgatctccattacatcctgggattgaatggccctataaaaatgtccaccgtgaaagacagattcaaaaactgaagaaacagtatcctgatggaagtcctttaacatcctccaccctcaagcttcagcccttcccccaggctctacaatagaactcccatccccaaccctggccaggcagagaatttatgagctctaagtcctgtttttctacattgatggaaatcacgggcaaacgtttccactgggccaaactccatccagagtcaaatatcaaggcacccagctgagctccaggagccagcgtttatgaagccagtcgatgtgccctgtgaccgtaaaccatcttatatttactatgacaggacagtatttgagttaataaaaagacgatttttctgcctaacttttgttgcctggaaggccctagcttcttttacaaggggattgtgtgtcaggacccgatacagagcctgaaaagccagctgtttgctcatttcattggggtaaagaaattgagtcagacgtaaaggggccctaaacaagattccatagattcttgaaggtccacgataagtgggaaaaatacatacctgttatcttgtatgctgcaaatgggaagcagggagaagagaatcactttatctaaccttcccagccctgccttctccagggatacctagaccccatttggaaaaagggacagtgatgagcctctgaaatgttcgccagaaccgcagcaaagggtagaaccacatcatcaatttaggttggtcagggtatggaaagaaactgaagttggggtataaagggaatgaagggatttaggagggagcttcctgctgcagaagggacaacatattctgggctctttcagttacctggagggtctgtgggttgtttgctaccaatgttgcatttatttcactcaagtcattctgcaggaggacctatgccagctggggccaagggaattggagcaggatgtatgtaggcattttgtgaggatgtaagcaaactaagaaaatgtcagatatgtccagctactagtctaaagtgttgaccccagtgtggggggcagagagggagcatgtaagttgtcctcatctctagagcagcttcacagaaatccagaggttcttttagctctgacactctctaactctgggaatcactaagtcaatggagttcagagggtcatagttgagcaaagcctcaggaaacagccttttcaaaggacacgcacaagtccccaacacagaactgaaggctgctgtctctctttctggcaatgggtatttgtccctggagtatgcggttgcagctccttcctttcctgatacacgtttctgtactttttaaatgctattaattaactgtgaaaggacaacttaaagatcacaaaattgcaactatgagcaccggtgccaggcactagtttttcttaattatcaagaaaaattaatttcttattaattattattgaataaatgggccaatctacgattgcacaataaaacatttggactcgtcttgtggaccacaaagctgaattaccattgctcttcaggaagctaaagagattagatgggttttaggaagtttttactgttaatccaggaaagcaattctgcctccatcagcagcacctcatgacatgtgttaatgatattttttctgtactctgaacttccttttgccaatgctcagcaacatgcatttttaccccttgatgcagaaaataacagaagtgaaatatcctgaggaatattaaaggcagtagggattttctcaaaaggttcagatgctttttggcagagatttattttttctgagtaaattatccaatctgagactcctttagtatttgattttaatccatttaaatttattttgattacagttgtcccttggtatccacaaaggattggttccagtaccccctaaggataccaaaatccatggatgctcaagttccttatataaaatggcatggtatttgcatataacctacacacatcctcctgtatacatttaaatcttctctagattacttgtaatacctaacagaatggaaatgctacgtaaacagctcttagaccatattttttagaatttgtattactttttattattgtattgttttgtgggagcgggggctggagattggttgaatccctgaatgtagaacccacagatgtggaatgtcccctgtgcttagaaatttggacttctttccttttttttttttttttttttaagagacagagtctcactctgtcacccaggctcgagtgcagtggtgcgatcgcagctcactgcaacttccacctcccgagttcaaatgattcttatgcctcaatctctcaagtagctgggattacaggtgcatgccaccacccggctaatttttgtatttttagtagagacggggttctgccaagttggccaggctggtcgcaaactcctgacctcaagtgatctgcctgctttggcctcccaaagtgctgggattacagacatgagccatcgtgcctggatgaaatttggacttgttttctatcatcttatttgatgctttctatgtactatgtctgtttgtttttttcttttcttttattggagtagtcaagtttattttattgaatccctttccagtttagaaattattatttcagtggttacatttcaatttttgcatggtagctaatttaagaaaacctcaaattactattgcaatccttctctatcaatgcaagggtttaaaaagcttgaggccaggcgcagttgcccctgcctataatcccagcaccttgggaggccaaggcaggcagatcacccaggagttcgagacaagcttgggcaacatagtgaatccccatctctacaaaaaatacaaaaattagctcggcatggtggcttgcacctgtagtcccagctactccagaggctgaggaaggaggatcacttgagcctgggaggtcaaggctgcagtgagctgtgatcgtgccactgcactccagcctgggctacagagtgagaccctgtctcaaaaaaataaataagtaagtaaaataaaaaataaaatgctttaacactgccctccacttcacctttctctcattctaattttaccattggtaaaactgctgttaatccaagcaacatattacttttattaattttatagtcacagctcgtttggatggatgagtgtgtttaccatcttctcggctcacccttgcttttagtacatcttgttttccttctggattcagtctttcttgctaaagcatgtcatttagtagtttcagtaaaggttttgtgtagttacttctctctttgtttatctgaaagttctccacgttctgtcctctggaagttttattaaatgcattttggacctagtaagtctatactccgagtgtgtaaaccacccttttacagttccatctttttatctctttaagaagtttctcaaatcttttcattgttaacgtttttcagctgttttcctctgctgttcagtaagtttatcatttatcttttagttattacaggcataccttgccttattgagctctggtttactgtgcattgcagatattgcattttttaaaaattgaaggtttgcagcaaccctgtatcaagtaagtctatcggggtcatttttccaatagcatgctcacatgctgtgtctctgtgtcacattttggtatttttctcaatatttcactttttcatgactattgtatctgttatggtgatctgtgattggtggtctttgatgttactattgtaattgttttgaggtgcctcaaaccacgcccatagaagacaaggaattttattgataaatgtgtgtgtactgactgctccacagaccagctatcccccatttctctcctcctcagcctccctattacctgagacacaacaatattgaaattaggtcatttaatatccctacaacgttataaatgttcaagggaaaggaagagttgcacctccctcactttaaatcaaaagccagaaatgattaaacttagtgaggaaggcatgttgaaagctgagacaggctgaaagctaggcctcctgcaacagttagccaagttgtaaatgcagaggaaaagttcttaaaggaaacaaacgtgctactccagtgaacacacaaatgataagaaagtgaaacagccttatcactgatctggacagaagatcaaaccagccacaacatccccttaagccaaagcctaatccagagcaaggccctaactctctcatattttatgaaggctgagaaggtgaggaagttgcagaaaaaaaaagtgtgaagttagcagagtctagttcatggggtttaaaaaaagaagccatctccataacataaaagtgtaagatgaagcagcaggtactgacacagaagttgcaaaaagttatccagaatatctacataaaattattgatgaaggtggctacaccaaacaacagattttccatgtagacaacgtggaagatagaagaagatgccatgtaggaatttcatagctacagagaagttaatacctggcttcaaagtttcaaggacaggctgacacttttgttaggagttaatgcagctggtgactttgagctgaagccaatgctcatttgccatttcaaaagttctagggcccttacaatttatgctaagcctattctgcctgtgctgtacaaatggaacaacaaagcctggatgacagcacatctgtttacagcatggtttactgaatattttaagcccactgttgagacctactgctcagaaaaaaaagatatccatctaaatattactactcattgataatgcatctggttatctaagatctctgaggtataagatgaatgttgttttttataactgctaatacaatatccattctgtagcccacaggacaaagagtaattttgactttcaagtctcattatttaaggaatatactttgtaaggctatagctaccatagatagtgattcctctgatagatcttggcaaagtaaactgaaaaccttctggaaagaactcaccattctaggtgccatgaagaacatttgtaattcttgggaggaggttataaaatatcaacacaaacaggagttttgaagaaattgattccaaccctcatggatgactttgacaagttctggacttcagagaaggaagtaactccagatgtggtggaaatggcccaagaactagacttaaaagtggagcctgaagatgtgactgaattgctgcaatctcacaataaaccttgaaccgataatgagttgcttcttatggatgaacgaagaaagtggtttcttgagacggaatctcctcctggtaaagatgctgtgagcattgttgaaatgacaacaaaggatttagaatgttacataaacttagtagataaaacagcagcaggatttgagaggactgactccaattttaaaggaagttcgactggaggtaaaatgctatcaaacagcagcatcgcatgctgcagagaaatctttcatgaaaggaagagtggatcaatgaggcaaatttcatttttgccttattttaagaaattgccacaaccaccccagtcttcagcaaccactatcctgattagtcagcagccatcgacactgaggcaacactctttctcagcaaaaagattacaactcactgaagactcagctgatcattagtactttgttagcaataaagtatttttaaactaaggtatgtacttttttagacataattacatagcacgcttaatagactatagtatagcataaacataacttttatacacactgggaaatcaaataacttgttcagctcactttattgtaatatttgctttactgtgatatttgctttattacagtggtctggagcagaacctgcaagatctctgaggtatgcctggactatgtttttctgctattttaatctgcagtttatccttcctattgagtttttaacttcaacatttacaatttttcatttcacattctatttggctctttgtcaaatatttttatgctgtccagatttttcataataattttaatattttcttttgtttctttaatttgaaacaagcatgtaagtatctttcagagtgttatgattttgaggtcagtttggggtttgttggttctactgcctcttccacacggtaggtttctttcttcgagtgactgaaatttctaactgtgtttcccatcctcaattgtggtcgttcattctggggtagtctcctgggaaccaagttgtaaaaaatcactcggaacagcttcagtttttcttttgccaaagataccaaggttttcaatggtcctgagaccagttcttctgttgatttctcagcttgtggttctcacacttcacgggaagcataaactcaggccacatgcaaacatagagctcagacctgtggttttaattccttatgagagactttttttatttttattttttgtccaaaagcctacagagagggcaagcttcctggcacttttgctgagcctgggaggcagggttttctaatctatgaggtcaaggagcatggagcgtgtcaagatgcttggctttatgtataggcatggttttgtctccaggggcaaatgcaggcagtggccaaattcctgaatcccagctttcaacccaggtcttttctcctgtttattgtctgtgggctacagcagcctcagcccccacttactgccctggcaggatttccttactttgaactttggctggatatacttgtttttgttgtggtagctgttacattttatgcagcgttcttttgtgtttattttgggtggaaagaagagagaagtagatcacttctttcttcagctcagtccctcttattgctggaaatgtttctgtgataattaaagattttaattatgatgctttattggcaccatattatgtgaacagaggctaggcatccaagctccacatgcattgctgcgagacatggcagatacacacaccagtcccagccctccaccggagactgctgcggcctgtcagcaagtacacaaagcctgcatgaatcaggtgattcacggccagtgtcccccagccatgccctgccagctccttccatttctatctctctatacaaccagtagcgatttttcaggcgttcattttttacaactatcaacttctgaaactttaatgcaagagacctccactgggagtaaaattctgatgtaaattcaatcccttgggaaaggtagtgaaacaaaaagtaaaatataactgaaaagcatgtctgaagaatctcagtgctacctctcctttggagctggcttatcatcagctctggctgtcaccttcctggttttcacattctctgttcgtctccatctaaaatgggtctttaaccattccacactcctcccaccttcctgctcacagaagctgtgtcctagatgtgtaggctggagattctattctgggacttcccattaatccctcttggaaagtggcactgtgcagaagatgggagttagctggttaacaaacagttattctaacctttcaaaatcctcttatagctcaaaactggtagaagaaaaatcttctagaattattgatatatgaatattctcaccacatttgagagattccagctgttactcagagatgcaaagtaaaccaatgatcttaggatatggaagacgtaaatcgtactcaatgctaccaggagacaaagaaggaccttctccatgctatttcaatctctgtctcaaatgactcgttgtttccttcttgaactaagtaactactacaaaagtctattcttgctgtttgtcctaaaagtgaaaagaatattggatgcttagttctaatacgctttttcatgataaaggtaataatatcaccttatacggttttgaaaaaaaagataatcactcatccataattccagcattgctagcattctaaggttatttcctttttgtttgtttgtttttcgagacaaacaaactctgctctctaggctggaatgcagtgacacaatcacagctcagtgtagcctcaacctcctaggctcaaagtgatccccccacctcagccagattagctgggatacaggtgcatgcaccaggcctagctaatttttgaattgtttgtagagatgggatttcatcatgttgcccaggctggtctccaactcttgggcaattcgccagcctcagcctcccaaagtgctgggattacgggggtgagccactgtgtccagcctacaacttatttaaacacagttaaaatcaaaatatccatgtatttttcacatatttacaggagttttaggttcctacgcatctcagttttgttttgttttgttttttaatcacaacaaccctttcactaaagcaaagtaaaagtccttgaccatatttgacagagaaggaaactgagacgcaggcatttggcaatgagttgctcagcattagagatataggagaggcctgttgttaccaaggctgtcttcttaggtgtccgtaaacctagggaattcacaattgtgctatcagcccatacaaattcatgcgtagttagaactagagccaaactggaattaaagggagaaaggtgggaggaagggggctttgcaaagctgtgattatgaatctaatcagtgtatggcctgtctagaaacaataaagccagtttccttgtgacacatgtagttctagagggaattccagataaaaatcccccgaaatactctgtgtgacggcaatactagagtaagtacataacctctgctggggactgctttgatggacattacttaattggatctataaattatgtgtgtctgttttcaaagaaactcagtcttcctattctcatattttacataattcagttgatgcattattttagcaagtgctctacgctttgacgactgcaggaagaaaatcgctttctgagggcaacctagatggcacaggttaccaactggccaacctcacttcacctcaatgactgacaattttccataactttacagcaagcctctgatgtctcaggacagtcatatcctcagagggatcaggaaatcaaaaagggaattagtgctggagagaggataggtagatggaaacatatatgataaaaacaagtttagtaaaatgtaaagaatagaatctagacaatgggtagatgagttttcactataaaattattttagtgctgctatatactgaaattttcataataatgttttgttgttgttgttgttttgaggtggagtcacactccgttgcccaggctggagtgcggtggcatgatctcggctcactgcagcctccacctcccaggttcaagcgtttctcctgcctcagcctcctgagtagctaggactaccggcatgtgccactgcatctggctaatttttgtatttttagtacagacggggtttcgccacactagccagttggtctcgaactcctgacctcatgtgatccacccacctcggcctctcaaagtgctgggattacagccatgagccacagcaccctgccaataatgtttttaaaaaacacagagactccacaggaaaatgcttttctgggtaaccaaatgttgctggatagatttattttttctgtctctcttcatctctctccttaccatgtcctttttacgtctatgaaatgtttagggatatttctctaaaggtgaatgaatatgctcagaaaacatttaatcaaatgtatttttgagaggataatactgagtcctaaagaagggaactgacttatcccaaatcaagtcatcatatggcaggtgcaggatcaaaggttgggctcctgtgtccaaggatcctttccatcctagggggtgaccgctcggaccactttcttgtgggaccctatctggaaggactaggaaaacaatgcatttggaaattgtaaatggaggcttagagaaagtcggggtgctaagaaatacccatgaaaaaagggcatcaagggaggccagcagaaagtatgcgagagctgctacagggatttgatcctgaggttgatatagggctcacaattgtattggctgtaattaaatctctggcttctgttcatagaggctgggctccctagaggagaggtccaggctgtgttttaatttgttaaggtcatttcacctgcctgatcttcacacccatgcttttattttacaggattaagtagacggggaattcaacagctattttctgagtttttaccatgtgcaaggcactgtgccagaaaccacaggaaaataaaaaattgagcaaaacacaaactcaaggaactagccgtcctgttagggatatgggaggcaggaaaagaataagttaaaattgtatatattgaattagggaaagcagatgacccttttccgccacaagaccttgcttatttaacagcctgatcccaatgagcagaaaaggacttttatgtggagtcctggagttcaggaggtcctggaagaaagattacagccaactccactaaagtttttccactgatgtctggatttcattgaacaccatgagattcctcaccctgatctcctagttgacaaatccatcagattttcagtattcttggctctccttagcctccttcctgtccacatttaaaatgacctttccccaacctctatggcattacagttgccctagatctcatccaccctctctgaatgcattttagaataccccaatgcccacaggaaggcttcttccaagacctcctcctccttccaactcataaatactcaatccatccatgctttgtcttctcacttccaagcagagcattccaagcctccatttgtagtgttatgcctgtctcatggaaggttccacctagaactcgaagctccccacctgacctctctgtctatccacaaccatgccccctcagttctacccatttccacaccaccatgctgcaaagttgggaaagtcatcatttatgattcctttttagtctcctgaaccaaccagaaatcgaaatctgatgattcttcctctccagtctttcctggtccaggtcttcatcgccaccagcccaaaagacagtagctgtgtctctggcagagttcccacctccagaaccctctatcctcacaatcaacatgtgactgagctcaatgttgagtgtgagtgtcaacaacacgggctgaatgtttgtacccctcccccaaattcatatgttgaaactgtaatctccaatgtgatggtacgaggagctgggggcctttgcgaggtgattggatttagatgaaggcatgagggtggagcctccaaagtggagttacgggcacaggggagcttgcctccttctctctgctctctctgatatgtgagaatacacaagaagatggcagtctgcaaaccagaaagagtgcccttactggacaccagctcttcccacgccttggtcttagactttccaacctccatagaagtaagaaatcagtatttgttgtttaaatcagtggtattctgttacagcagataaactaagaccattccctaatgcagttctcaccccagtactctctatccttgtgctcaattaattcagtatatacccattgccatatcactctttttttttttttttttgagatggagtctcactctatcactcaggctggagtacagtggcgcgatctcagctcactgcaacctccacctcccgggttcaagtgattctcctgcctcagactcccaagtagctgggactacaggtgtgtgtcaccacgcctggctaattttttgtgtttttagtagagacgggttttcaccgtgttagctaagatggtctcgaactcctgacctcagcctcccaaggtgctgggattacaggcctgagccactgcgcccggccctatcactcttaaaacagtgggtcgggtgtggtggctcacacctgtaatcccagcactttgggaggctgagacaggcggatcacgaggtcaggagatcgagaccatcctggctaacacggtgaaaccccatctctactaaaagtacaaaaaattagcgggacatggtggcgggcgcctgtagtcccagctactcaggaggctgaggcaggagaatggcatgaacccaggaggtggagcctgcagtgagctgagatcatgccactgcactgcagcctaggcaagagtgcaagactccatctgaaaacaaaaccaaacaaaacaaatacacacacacacacacacaaaaaacacacaaaaaaaatgaagggcatgtctcataatcaccctgctcaaaaatgttccccatgtcaatagatggtaattgtaaaacactaaaactgatgtccagggtcccttgcaaggggggtctgctttttctttcccatctcaccttgaaatactgcttgaagacaaaatatcccctatagtcaaattaatcctcttgccaccatcctgtaatgcatccacatatgcttccctcttccacttcacagttgcccctacctggaattttttctcagtctctctgtttatctaattcctatccattttttaataatcccatctccttcaggaggctttcccccatttgctttagcataccaaggccactcttgcttgctctctcagttgtgaaactctctgataattattacctataccctttgcctagcattatgtgtactacccatgctgaggctcttttctgattcctccatcaaattgcaaactcctacactaagtagggaaaaagcatcttttaggttcaaaaaagaaatggataatggatgaggtcagaaagacatgaaattctcagcctcaattttgatttcataatttgccaaattcataagacattgcaaatgaaacacactggtaagataaaggcaggggtatgctttgaagaagaaactatagagcatgaatctataccttgctgattcctagttccaatcagggagtttttgctctctcacttctaactgtggtgacttgcatcaggaaaagaatacaaaaaatcttcagctcacagcttattctaggggtcaatcaaagattttagctccttctgcctgtatctgaggttcccagatagcacaagaccaaaccagaggttagcaaagagtctgccaatagaagataagaagggagggaaattgtattggaaaataatgagctgataattgactagtggctggaatgtctaccgaaagcccagcaggtttagaagcctcaaaaataaccattgtaagtattaactgtcgttcccatcaatgctgggaagcagaggctccagttagattgggggagctagaaacatttcccagaaaagtgccatggaaaagatttaccctgctgtgaacagcatattcacggcaagtctttctggaaagcagataaaggtcttgtcgctcaaaggatgatctccacactagtagcatcagcactacttggaagcttgttagaaatgcaaatgctcgggcctcatgttaagcctactgcattggtatttctgggactgaggcccaggaacttgagttttaatcagctctccaggtgattctgatgcaacttaggttaagcactgccttagcaaatggtggtggtggctgcattaacaattgcggcacagcaagggactctagaccttaatagcttaaaataacaaacattgattatctcacacagttgcccagagtcaggaatgctgcagctgcttaagtgggtggtcccagctcagctcagtgtatctcttgcgatcacagtcatcagctggagctgcagacatatggatgcttgaataaggtggaagagtcactccaagctcactcacgtggctgttggaagacttcaggtccttgccatgtgggcctctccataggcgctgctcacaaaacatggcagctaatttctgctacttcaagtcactccagacagagaacgcactcaagacagaaagcacaatattttaacaagccaagcgtggaagatacatctcatcacttctcttatattctttttgttgcaagtgaatgactaggtctagcccacatccaagaggaggattatgcttcaattattaaagaaaagagcatcaagagtatatgactttgtggacatatctggaagatcaccacagcggtgttaagggtgtccaaaaacttttaataacacctaacatctgaggcatctgattttaattaatgcctctccagcagtagagatcaagggacattctaaaaattagttcactattcctagagcaagcaacaatcctaatgatttttttaaccaataaaccggatggtgcaattaatcacaattttcatgtctagcactagatggcagaacagacatttggttggtaggatggcctactgcattagtacattctcatgctgctgataaagacatatctgagactgggtaatttataaaggaaagagatttaatggacttacagttccacatggctggggaggcctcacaatcattgcagaaggcaaaggaagagcaaaggcatgctttacatggtggcagacaagagggcgtgtgcaggggaactcccctttataaaatcttcagatctcttgagacttattcactattgcaagaacagcacaggaaggatccacccccatgattcaattaccttccaccaggtcccttccatgacacatggaaattatgggagctataattcaagatgagatttgggtagggacacagccaaatgataacacctactcagcatgctattaattcatggaactaaggtttcttcaccctgagtctgcctggccaggactggaggaaatcttgctagtctccagttctccaagctattatcagttcattgtattcctggggttgctttctgactgcctcatgaaagaagaccttccttccccactgccttccactctgaagagccttttggtctggcaaggaaaccagtacagctaacttctccctcccgggacagaggaataatgagagcttgaggacattcatgacaacagtcatacccacaagctttccttagtcaaaatttacataatccaggacagaatacatatagaataatacaactgtaggcttggaggaaaccaacagaaatcaccaaatttgacatttttatttagaagatgaaaaaaactcagtcagagataaaacacaagtatgtacaagttcaccaattaattaatggcaaagccacggctagatccctactagaaagtgctttattatcctagtcaatatgactaccatttgcatcaagttcaggccccagcttttaagtctagtgactattttaaagaagacaagaaattttggtagcagtttctggtgtgtgtgtgtgtgtgtgtgtcaaaagaattcttagaatagctcttaatctagaacccaatcaaaacgggcatcttcacactaccagagacagtatttgatacaacttttccaaagggcaattttgtaacaggcgtcaaaagatttaaaaaatgcatatatcactttactcagccattttttctgctgagaagttatcataagaaaataatgataggtgagcattaaagatttagttacaaggagtccacggcagttttagtcatagtgaaatattggaatcaagttaaacattgaacaataaggattgcctaagtgacttatgggacatccagacaacagaatccatgcaatcttttaaaaaatgcttaaaatctttttaaaagtcagggtttccaggccgggaatggtggctcacgcctgtaatctcagagctttgtgaggccgaggtgggcggatcacctgaggtctggagttcaagaccagcccggccaacacggtgaaatccccgtctctacaaaaatacaaaaaaaaaaaaaaaaaaaattagctgggcttggtggtgggcgcctgtagtcccagctacttgggaagtgcaggtagaagaatcacttgaacccaggaggcagaggttgcagtgagccaagatcgtgccactgcactccagcccgggtgacagagccagactccatctcaaaaaaaaaaaaaaaaaaaagtcagggtttccacagtggtgtctgaaaatttattcaatctaatctgaagcctgggcccagtctctcctagacatacatatccagtgttcagtacagtgcttgccacaggaaagagacttggtaatactgaacgaatgaatgttgattagatttttagcataacaccagacacaccctaataacaaaatcttacctgagtaagaggaattacagagatcatgtcaatataagcaattatttgcaggtgtgtcaagtatttgactgtttgaattacttcatgtattcaaaatagatgttgatttttcattattaaagatactcaaatttgtcatttttattaaatatacaaaatatgcaagcaacatgcagctacctaggaaaacatttattactagataagctgaacattttcttgaccatatcacataattatatatttttaaattcccagatgcctagcactgtgtatcttttcaaaaaagaaagccattcatataactggacacgttttttcattttaatgaaattttttgtctttgttgtttcagcatcataaagatgtggaaactctaccactgttctattggtacagtactgccgggagtgtaaaatcatacaaccattttggacgtcgatttggcagtatgtatcaaatgttcatagcctttgaccttatgattctacttcttgaaatgtattctaaactcttactcaatattagaaataacattacaaacaaagattcccatcaaaagtatcccttataatagtcccaaattaaaaagtaccttaaaggggtaatgattactatgagatactcttaaaagaggatttaggctgggcctagtggctcactcttgtaatcccagcactataggaggccgaggtgggcagatcacttgcactcaggagttccagaccaacctggccaacatggtgaaaccctgtctctactaaaaaatacaaaaactagctgggcaggtggcgcatacctgtaatcccagctacttgggaggctgaggcaggagaattggttgaacttgggaggcggaggttgcagtgagccaagatcacactactgcattccagcctgggtgacagagccagactccatctccaaaaaaaaaaaaaaaaaaaaaaaaaaatcataagaaattatgctttgggagactgacagaactcctcagatcacctgaggtcaacatggggaaaccctgtctctactaaaactacaaaaattagtggggccgtggtggcgcttgcctgtaatcccagttattcgggagcctgggaggcagaggttgcagtgagctgagatcgtgcccctgcactcagcctgggtgacagagtgactctgtctaaaaaaaaaaaaaaaaaaaaaaagaaaaaagaaattatacatatactatgatcttaattaggttaaaaacaaaacaaaagcaaggctaccagttttgcatttgccatgtcttgcatttgccattgcatttgccatgtttttcgtaaggggcagcatatacagtctgttgtgctataatgccaacacacgcattcttcaaatcactatgctgataaaaattcacagattaaaaaaaccacaggacttagaggaaaataggattagggtacaacacttaaaattttctcagtggtacattaaaaaaaataaaaagaacctaaataacaatggtaacacagttccatacatgttgatggttaagaaatccagaaattctaaaataaaaatgacactttgactttgaaaaagccctagtgttttctcatggaagtgggcattggaggggttgcagtttgtgaattattgtgaagtggtgaatggaaggttatctaaaatcagatcagcaaaacatcacactgtaccctgtttatacatttatacacacaattagtatttgtcaattaaaaacaagttaataaaaaataataattttaaaaagaaaaacatagtaaagtaaaatccagcttaaagccagattttaggggtaagactcagaacacacacagtggaccaggtgcagtggctcacgcctgttatactaacactttgggaggctgagacaggcagatcacctgaggtcggagttcgagatcagcctgaccaacatggagaaactccatctctactaaaaatacaaaattagccggacgtggtgacacatgcctataatcccagctactcgggaggctgaggcagtagaatcgcttgaacccaggaggcggaggttgtcgtgagccgagatcacgccattgcactccagcctgggcaacaagagcaaaactccatctcaaaaacaaacaaaaaaaagaacacacacagtcaattgaggtctctggtaggcggttggggcatgtacctgcatgtgtgtgcttgtgtattcctgtgaggctgggtgcaactttcgcttttctgtattcactgccgtttcttgtgaatgaaaatgcacataagcaaatgcaaagctcacattatggtcaaatggtatgctcaaagatattaatattaatatattaattccattggaacaaatttgcatttcaatacaagcattacagcagaactgacttaacttatatgtctatcatatacatttatatatgtgctatatacacataatagtagaagcttctgcagtgggtggatcacctgaggtcaggagttgaagaccagcctggccaacatggcaaaactctgtctgtactaaaaatacaaaaattagctgggtgtggtggcacgcacctgtagtcccagctactcaggaggctgaggcatgagaatcacttgaacccgggagagagaggttgcagtgggctgagatcgagccactgcactccagcctgggtgatgaagtgagactctatctcaaaaaaaaaaaaaaaaacgtagaaacttcctaattaataaactttaacataagctaataaaataatatttctaaagttgtctacacacccaacactgtctgaaaacaactagccacacaaatacagaataaatagatgtgaatgtgcttgtcaatgagcaggcaagcaagcaatggactgaataaatatttttaccatccaaataagttatgttatatcaatgttttgagaacttatcttaaaaacatgatttgatgactagaatagctacagaactgttttaataaactttggtctatcagataagtattgggctaaatgaccccaagttcatttccaatgctaataatgagattttgtgatagtgtacttttttcttaataacaaggtactttatatttagataagaataaataaactcagttcccagggggtcgccctttaactactgtctgggcatttctgtgccaatagaatgtaacacacagactcatacttttttctttcctaaatgtcacctgagaacggtgtgaaattttcttcctattttaaaattaccttgacttaagcaaacagacacacaaaaaaagactttcctggcaaacagtttgaccaatgaacaaatgacaggaagtgttcctcctcttttttttttctgatggatgttataaaaggggaaacaactcgtttggcaaagtatagtacatcatcactcaaatctgagttcaatagttcaaatttttagcggccttggggaggaagaaaaagaactttctgttttcaaggaaaatgattttgcctgagcttttaaaactgagctagcatattctatgcaattctgataataggcatacataaaagtcatatgcccaaatcaatgtattgaagttgcttaaatatccagttattatttggtttttaagaacttcctgtttaaaagggcaataattttgcccgaacctttacaactgtgctagtatactatgataataggaatacataagtcagaagtccaaatcaatatactcatgtagctatttaaatgaactatgctttatttgcttttttataaatgaaggaaaaacatgcttgcatgaatacagccaaaatataatctgtccactgatgtggtttgctaaacgatcaaggagttgcacgtgaaatgaaacatttaatgcccaacgtatttctaagatttcaaaataatcacgttttcatttgcatagtactactttctcattcattatattacttaatgattttcatgctttctttccctgagaaatcaatcagtctatcagaaatcatatttaaaatactatggtgtctttccgagtgacttattttttagataatgctgtaatacagagtaacctctggcaggcaaagattcacatttgctctttgataatgtgtaagtagcctgcacagttcctgagactcagtcatttgttaattttgtagaggcagatagtttaaattcctgtgaagatgttacagccattcattctccagatatgagagaaaaatgcaactttgtgaacaaaattatagtggtaactgaaaggcaataaattgtgggtatgaggaaatccactggaaatccacggccatagaaaggcatgagacgcgggagacgtagagaagatacaaacatttcggcatctgtgaattttaggactcacagaagtcttcagagttattccttgaaaaaatctgactcgaccactaagaaaatttgaaactgccgttaaatcacattccccttcatgttggcctctttgcccttttattggtgggcctctgaagcatttgatgagggctactttctcttttctcttccccttttggttttctattttctcctctgctgcagttgtgtggagtttctggtcatgcaatgaaatattctaaattttgttacatatatgcagagagtcacaaggagtctggctttattttaatcaggatattagaaaagtgaagatctcaggcacgtatttgtttaaacttaagccaccagcttttacattctccagttttctgggctcctcatactctcaatttctcttctccctcatcccctccagaaaaatgccccttaacacgtcaccatgctgctaaaggcctacccttagatttttttatcaaactggaaaagaaactcatggtgaaatacattaattatttgcaatatcccaatattaaatctaaagagatgacatgaacatagttgttgaactttacatagtcactccacttattttaaataacattcagcttgaaattttctctatttcttttctctacgaacctctatgagttggagagaaatattcgctgtgaactaaatgagaaattgaacactacaacggtatttggcttagtttggttttgttttgccatgagcagtacatttgtgagtcagacaataaagcaataatacattggtttggttttctcactcctgagggtttttgctttgcttcgtttttgaggatttctcaccattaccatgatttccagagaagaaaaaggaaagtattgaatgcaaagcaaagagtacctggattttatgtgctatctggtattcatagtgaacacataaaaatatgtcactgatggaagaatagccaatggttaaaactttttaaaagccttcaatgttaatgaggaaaaaccataaggtatttaaatttcttcattctctgatgaaatcttcaagcaagtattcaaaaaatggagattcttaaagcaagtttgtctttattttcatacttgcaatggagcttagaatagactggtacaagtgctgccttgaagaagaaccactatgcttttaccaaaatgttcacgaaaattaaacaggcatttcagttgctacatggctacgtgtgtttaatcattaaggatggaaaccataagcattcatccaaagagcacaacctgcaatttccaaaaaaaaaaaagaagaaagagagagagaggaaggaaggaaggaaggaagggagagacggagggagggagggaggcaaagaaggaaggaaggaaaaaaggaaggaaggaaagaaggaaggaaggaaagaaggaaggaaggaaagaaggaaggaaggagggaaggaaggaagaaaggaaggattgatttggctaaaactctctgattaaaaaaacaattaatcatgccactatacataagcaaacacataaacacagaaaccagggcatataggtgcagtaaccaggaaaaaatacagtaagcacattctaaaccctcttttcatctcaggaagttttattcacgtggataactagtcataatcatcacaaagcaagtatgaggatcccattgggtgactcaagtccaggaaagatagggaaggtggcaaagattacacagatacactggtgaagttcattacattcctgtgtcttctgacacatttccatttactcatcaccccatgccatgtggcttctgtcacaccgcaaaagcccacctggcttcaaggtcaccaatgacttcttaactcacaaggcaaataataaaacctgtattcatcctttctgtagtatttgataccacggaccttgaaaccatcctcccatcctcattaccagcatttattgtggaaatgtaagttagagcaaaactttgaaagaactataccatgaacaaccatttagccgccaattacaatctaaatactcatttttctgtgctttttttttttttttttttttttttttttttgagacagagtcttgctctgtcgcccaggctggagtgcagtggtgcaatctcagctcactgcaacctctgcctcccgggttcaagcgattctcctgcttcagcctccagagtagctgggactgcaggcatgcaccaccacgcccggctaatttttgtatttttagtggagacggggtttcaccatgttgaccaggctggtctcaaactcctgacctcaggtgatccacccgcctcagcctcccaaagtgctgaggttacaggcatgagccagtgcacctggccctattctccttttttttttttcctttttaaaatgcatttcaaagtaaattgtggacagcagttcacactaaacatttctgcatgcatggtatagactacagaaattctccctttgggtctagaatagaaataagcaccagtaggactcggaagacctaggtctgctcctctacatacgttcacatcttggctgtgctggccactgacacaaccgtagtgatcatggctcccaaatctgacccttactcctgggctccagcttaacccagagcgctttccactttacgtgtatgaaacaaaattgctcgttccccttgagacctgttattcctccttctgcgtttttttttttttttttttttttttttctgacagagtctcgctctgtcgcccaggctggagtacagtggcgcaatctcggctcactgcaacctctgcctcccaggttcaagcaattcccctacctcagcctccaagtagctgggactacgggcgcggactaccaagcccggctaattttttgtattttagtagagacggggtttcaccatgttgaccaggatggtcttaatctcctgacctcatgatccgcccgcctcagcctcccaaagtgctgggattacaggcgtgagccaccacaacccgcctctgtgttccttatcacagttacagttactaataactgaactactctccctttcctcctccttttcgcatggctagtattccacacagtgttataagtcctacttctgaaacatctaccaaatatttccctcacttcccatgcataccgcactgctctagttcaagcctctatcatcggtcctctagattcctcaacggccacctatcccagtgtgcatccgtatgccaccgagaactagatttccacagcagaaccagagggggtctgtgaaatcagtcctccactgcaagccttcaatgccccctcctctgactctgcctccagtgccttgagcagccagtagaatagccattggcttcatgaggctactgagctcttgaactgtagttaacccaaactgaaatctgctgcaagtgtaaaatgcatactggattttaggccgggcgcggtggctcacgcctgtaatcccaacactttgggacgccgaggcgggcggatcacgaggtcagcagattgcaaccatcctggctaacacggtgaaaccccgtctctactaaaaaaatacaaaaaaattagccaagcgtggtggcgggcgcctgtagtcccagctactggggaggctgaggcaggagaatggcatgaacccaggaggcagagcttgcagtgagcagagatcaagccactgcactccagcctgggcgacagagagagactctgtctcacaaaaaaaaaaaaaaaaaaaaaaaaaaggcatactagattttgaagacttaatataaaaaactacaagatttcttactaataatgttttattttgatttcatattgaaaatataatattttagacatattagcttaagttaaaatattattaaaattaatttcacctctttactctcacctttttaaggtaactactagaaagttgaaattacatataaggttctcattacatttccattggactgtgctgtccttttgaataaagtcccaactccttaaacatgccccttaataatctttgaggccgggcacggtggttcacgcctgtaatcccagcactttgggaggctgaggtgggcggatcacgaggtcaggagatcgagatcatcctggccaacatggtgaaaccccacttctactaaaaatacaaaaattagctgggtgtggtggcgtgcgcctgtagtcccagctactcgggaggccgaggcaggagaatcgcttgaacccaagaggcagaggttgcaatgagctgatatcgtgccactgcactccaatctggtgactgagtgagactccgtctcaaaaataaaaataataataatcttcaaaaatctttcccaacctttgttcctaacttgatgtctcactcctcacctgcacagacagatgagtgaataacacgctgtttcagtgcagaagtcaggtgacaatgaaagtgacctcactgtacccctactactcctaaatgattcatatggtacccaggcatctaaaggaaaaagagagagcaggggatgatttataaactaaacacactcaagtacaaagtcaaggaagcatcaaaacagatgattaagcttgaaaaaaaagacctaccactactttgattggtgtttatgtctatttcaaaacagaatatttgtagttgagcatataatcacattctagaaaatgtcatcctcccaaacaactttgtgcatttcaaaaatacaggtcactggcatgcagttccagaatgcatgacctaatcccattcccacacagccacagggagctctgttatttctaaattggatcttgaattggagtttcatcacctacattctgcctccctaacattgccatcaatattagctgcgggtgctcacctgagagtaacccataaataaaggaagcacatatgagatatttgaagcctctggcttagcccagaagtctgcaaacaacagccagtggtcttatagtttgggtcaataaagttttattggaacacagccacacgtattcatttacatatcgtctgtggctgcttcctgctatacaagcagaattgagtggttgtgataaacactgtaccacccacaaaacctaaagtatttagtatctggccctttccagaaaaaaaaaaaaattgctgacacctggcctaaggggtcattaaattgttgttttttcattaaactcatagtgagtctattcgtggtacagttccaagccatgggcatatagggttaaaagaattgaagtttagaatccatagcatacaatgttcacacttagtttctcaaggggccctgaagcacattcattttagtcttttcaaacatgacttccatgtacactagtcaacgtttttcaaactgtttttttctattgggatccactatagcaaatacattttacacccaatcctttcagcgcacacacatctatataagtaaatataacaaacagaaccaagtttgtcaagacaatacttgtctttcttactacatgggattcactctcttagtatagtccattttatatgtagttccatttttttttttttagacggagtctcgctctgttgcccaggctggagtgctgtggcagaatctcagctcactacaagctctgcctcccgggttcacggcattctcctgcctcagcctcccaagtagctgggactacaggcgcccaccaccacgcccagctaatttttttgtatttttagtagagacggggtttcaccgtgttagccaggatggtcttgaccgtctcggcctcccaaagtgctgggattacaggcatgatatatagttccatttttaaagaatgattgattttatcagacattcatgtcttgtgattcatgtttgaaaaactcactggtccactccagctgtggattgtctaactctgaccttcaccacacgtcacaggctgtaaacttgcagccattcacttcagttgagattgattcgcttcatccacacagacgtttgtttggttttcatgtgggttttggtttttaatatgtaaattcttttccaatctgtttttaaaaagtcgatattccaagtttctttaaaaagtcagaggacaaggcactaggagccctccttcctacttggtaacaatccatgggagctgagcagtttctccaaggcctgttctccaatttgccacccttcgccaacagggcaaatgcacctgaaaatccccagaattgtcatcacaagctttagctccctgtgacctctccccacataaatataaaacagatccaatctgttttctttccatcattaaaccctagcagggcattctagtagaccctctggctttggggaaagcccttttgaacaaataatgttgtaatccaaaagcctcctacaccaaggagtaagagtaaggcctcattagaaagaaaaaagtggcctttctttcttaaaacaagaaaaaacaaaaaagcaaacacacaacatttgacaaaggaaactacaagaataagtagagttcaccagaaaattacacacacacacacacgcacacacaggtgcaagtttctgtttactttgtttaaagctttgtctgtgaaatgaaatcactgcatcgtggcagcgttttttcaaaacatggagttagggcaaacatggcttccgtttagaaaggtgacgaggggagcagttagctccgggaatgtaactttagttgcagcttaatccagttcccttttgttaaatacctgaacttaatgagaatccacagagatttatgaccataacaaacacatcatttttgactttgtcattcaaaccagcctggcaactttgatatttcctagtgaaaggagagatctaatccaagtaagaactctgaaaaaagggaaagaaattttattcccataatttgattgattacttcctactctgaacactcgagagagaaaaaagcaaactttttcctgtccatactcagatttctcctgctaatctttaacaagcaggcaacggccataaaacacaaattatttccaaggacccaaagaccaatcacactcgatgggttaccatacctgtaagtatcaaaatattgtggaaaacatctgagatgaaaaccagaaatttaaagatgaattgaccattgattcaattcaattcaaggctttaatttaatagctctgtgaggttaaaaaaaaaaaaaaaaactatgctacgactggttccattcaaaaaaatatttttatcattgttgcaaatctgccaaaactaaacttacatttgtggagatgggcaattatttcccaattgcatttaagaattataccattggaattagaagccctgagttcttgtctttcagcttaacctgggcaaagcacttctgtttcttcctattcggaagacaatctttatctttcagataccttctacctccaacatcctatctgtttatgattctatcttattggaactaaaggaagttcagatcaacagtcatgtcttatgtgactaatggtctgaccactccagtaaaggcttggtgttagtaatgaccagatgacaggaaatcaattagacaaacattattaataacaataataatgaagatagaatagtacttgggataacaaccaggctgtgctctcattgggggtattaacatatctgaagaatttttaaaaagcatcaatccaaaggtgaaaatatggaacagtgaaaaagacagactggcagagtggctcagcaaggttccgggagagcactggattggggggggatccctacagtgcaaaagggacctcagggtagctcggtgacactagccacggcacgcaggcctcagctctccttgctccaattccagattcagcaagcgtccttctgattacatttattttctttttcttttcttttttttttttttttgagacagagtctcactctgtcagccagactggagtgcagtggtgagatcttggctcactgctacctctgcctcccgggctctggccatcctcttacctcagcctccggagtacctgggattacaggcatggccaccacacccggctaatcttttgtattttgggtagagacagggttttaccatgttgcccaggctggtctcgaattcctgacttcaagtgatctgcccacctcagcctcccaaagtgctgggattacaggcatgagccaccgcacccagctctgattacatttctgacaacatattggctttctcacatagcagtttggagagtgtttttagtggttattgttattttgtaataaatgggggaaaaatcaattgaatgacacaagatttctaatatgttcaacaagataagttctgtgatcagacaacttctttagagaaaaagggagaaaagttgacaaaaatgaaggcggttttagttattccataataggccaattgactaacagaggtatttaaatacttttaaaaattcacttttatgaccatattttaatgtattgcccaaatttccttttttcttcttctttttttttttttttgggacagagtctcactctgttgcccaggctggagtgcagtggcgcaatctcagctcaatgcagcctctgcctcctgggcttaagcaattcttgtacctcagcttcccgagtagctgggattacagggcgtccacgaccacatccggctaatttttgtatttttagtagagatgcgatttcaccatgttggccaggctggtctcgaactcctgccctcaagtgatctgcctgcctctgtctcccaaagtgccgggattccaggcataagccaccacacctggccctaacgtgctgcccaattttctaactaaaggtccaagatcagaatgtccaagtcactctaccacatggggcagcctttcaatcccctgcatctttgagacattgatggcttgctatgtaggcaggtagcaagaactacctctgggcagttctgccagagaccatcacagagaccattcaccccagtggtgaggctctggcatgctggaggtgggtgaatctgggtttggcagtagttctatgacctacatagttctatgatcttggacaagttatttcatctttctgagcctcttttctgatctataaaatgtagaaaatgataggacctgcataaaaatataaatcctattaataacatcagactacaagcaacagatcattccgcatcatccagcacatagtgtagcctcaacaaatacagttaatatcacctcacctctaaaatgatagatttcatcaaagatataccgcggggtccaattattttgctattttaaaaaaggctaaaacgcatgaagaaaagtgtatagccactaaaatggaaaaatgccaaacaagtagagaatggtattaaatcacagaaattatttttaactacataagcatttgcagtctatcccttgcacgaaagcagttgataaaacggatccaataaagataagtgaatgaacgattcaaagaaaatactgttagtttcttggagtctcttgatggcgtgggtgttgttttgttttgcttaagtaaaaatgtaatgtggataaaactatttttacagttgttaaaaatatcagaggaaatgttctgagggagattttcattactctagtcaaccagaagcccagataaacataactgtgtatttaaaaacagaagcagaaaacgacagcacaccacctagacaggaactttgagtctgataaagctgggagtctggctgagcagttccagtggaataaacctgcatagttagaaggtgcaaagaaactgatcctccagaggtctgaaggttgcactttctctcttcctgcctcttccttgaatgcgttaattgttccaggtctgttttgctcctatggaaagtttcataacccaaagtgtctacaacaaaggttaaaacaagcgaagtaagcagataaaattactaagctggcctggaaaattgggaccgtgttgtcatctttgccataaggtgcatccacagctctggccctatctattttccctataaccagctttcaaccactgacacctgttccttctatgtttgtagccaaaaaaaaaaaaaaaaaaaagtcatacgcccaagtctgattttcctctgacccttattttagtttttagctctttgtgtcctcagagacctgtcatttacatcaacgtttttgttctctatgacaggaagctttggggaacctttcacaccttcttcactttacatttgcctgccatagaagacagaaagaaaggaatacaaaactgtctctgtgcttggttcggaaacaagagagtaggagggagccgtgagccaatatgattatgaaatcagctgagggaaagatcagcatgtctggaagcaacaggtgcggggcaggggaggggaagctggtgggcccatcctgggggcccttctgaaggaaaggaaagaagaaacacggaataaaagagaatcggcacagacaggatttcagtatgagccctcatccttcaacgcctgttaggcttctcctgccttctttgctgttttcacctttgattttagaatcattttagatattacaattgtgaaaaatagcacagagaattcgcatactcctttcacccaaatgatcatcttaggggatatcataaccctagaacagtacaacgatcaaaaccaagaaactgacgttggtataatgttattaactaaactgcatacactatccacatttccccagttttcccataaatgccttagttcagacccaggatccgaccaagggcaccctcgtgtttacttgttagtaatgactcacttttgtctccccacatctgggatagcttagcggtcttggcgttgttttgtatgatcctgacacttttgaagggtactggtcaagtattttgtaaaatgcccctcaatcagtgttcgtctaatgttttctcagggctatactggggttacggatttgggggaagattaccgcacaggtgaagtgccatcctattgtattatatcggggatcatgatctcaacacaacagggaatgctaaccttggtcacttggttaaggtggtgtctgtcagtttctccactcaatctgtcctatttgtccctttcatcctgccttcctttaacctgaccaccaccctgcatcccagcctgctctcccaggccctggactgcaggcgcagaaacgcctgtcctgtcggaactctcaaagcgctttcctgtgaagctgtcccgtgtgtggtggacaggattctcaacagggcatctcaggcaccttaagggttaaacaggcttctgtttagaatgacaggatcctcctccagagccacacaggggaaggaacaggcctgcattactgatgttgaaataaaatcatctggaagtattttcatttgaagctggctttcagacacagaggcaaaacacactaacaaaagtaatctggggcatatggtattcctttcagtcataggcatttttaatataaatcccctaatcatttatatcttggttttcagtttattgtgaagccaaatctcttatttctctccaaagaataaattccctgcctaaaagaagtgaattatccttgcttgaaaaaaaggcaaagtgcagctcatccttactagacagatcatcttgctataagtgctacctaaacacaagcttttgttgctgctgtagtttcttttttaaattgagactgcaaatatgctctatcatgatgaggtttttcaaagttctccctttaggggttccttcctgactcctcctcccactaggtggcgctacatatcacattcaaagcgggctgttcgagtcggtgaatagtttgtgttgaaacctttgcaagaatgtctctcgaactcccgacggcaagtactaaacttcattgttaattaaacacttccccgtctcttttcacatttattgtcatcagacaactgaaacaggccagttctgaatttctgtaatacagtcgggcaatcttaggataaatgtaagtttttaggggcctgaagaatcatgaccacatagtaaggcaaaaattcaagagttacatcacgaaggcaagaaactggggaaaggcttccattcactaactcagcattgcctggaatatgatctcaacagtgccccccaaattcttccctactcaggatgtccaatactgctcagaagttccccaattacttaataacattcctctcataaattcaatttctaaattttggcttcacaacagtttatttattcactatataaatatcccccagagagatttttaaactgtatcaaattagcaaaggttttaaagtgctgacaagcatttttaagacatccttataaaatgcaaagatgagggagtacaatttcctctgattacatattagaggcacatatttaataagaaaccttatgttcacaattgcaactcatcgcttaagcagaacaaattttctaaaagcttggagtttactatcattaggaaacccataccaagaaacgatgctctttttcagccaagttactatcacttggtggaggaagatttccccctaaggaaacgagctaagaatatcaagttcccgactgggcccagcaatttgactgatggtgattgcaatttgcaattgttcaactgtgtcccggagagatacgaggcctttttggttgttgttgttgttgttgttgttgttgttgatatcagagagttttgtttgctctgcaacactcttctcatgaagtaagcatctggtctatgtgaggttagcccctattgtcattaattacacaggcttatttcattcccatgaccctgccaaaatacagatttggcacttattctttcctggccaatcaacagacttatttaaaggagacaaatattttggccagggtattttctttttaaagagcaggcaggagattataacgtagtggtggattttcatggaagtctgtgaatttcacataaagtataagagcgtattataaatctcatccctgtaaaggaatatccattcacacaaggcattccagtccaagctctaccaagtgtttttggtgttgtttaatgcccggactatgatctcaatagtgtccccaaactgttccctactcaggatgtccaatattgctcagaaattccccaactacttggtaactttcctctcataaattccatcattgtccctgccttctcggtgtctgctcccgcatgtgtgagggtgtgcgcgtgcgtacacacacacacacacacacacacacacacagaggaactaggctgatcaacttgcacttctggttgtctattggggatgagcccagagttcagacatttagcaaactagatgacagtattttgggtccccagcctgtgaccaggtggggaatgtctaggtactgagaacttctatagacaagtacgctagactcagagtccaaagtaacatctcactctcttcctagccctcatctattcccaatgttctttcctctgctctaaggacagagcgcccttggccatcagtccacatgaccttgcatgggcggccagactgcagcttcgtggctcggatttcatttcaaactcttcacacagaaggggcttgcacagtacaggagggtgggaaactgcacatggagggactttgcagctgctcccagctgctacgaaatgccaatttctcctcctaggaatcgaaagggcctctgctcagtatgcctctctaatggacttgaaaaacggggccatgatcgttcgaggccagaaaatttcaaatttggatgaagtcaggggagcactagctcctaaactgtgagctggacaatctttgatcttcctgtatgctctagaataaaatgattctagtgatgtccttctctgctgaaattgtccagatttggctaaagaaaagaaactgaaatataagaaatagacatgctagtgtaagagactggataataaatatttcctatcttgtaccaaaataatagactgaaatattattgaatctaaacatttatatacatacatatgtatgtgtatgtgtacacacatatttaactactttattaataagtatcttttagcttacaagaaaaaagagacataccttttagttggtacagacagaaacaagcagaagagagcctccttattaaattctaagctcgcctgctcttgaactacagtagaggtattcggtcctgacttccagcaaagatctcaatgttttgaagctaaggaaactttttcctttcctttatgaagccaccatacatacaagagaaatggacactattcattgcaagggactgctttaccgtgacatgcaagccacagacatttgttttagtgatatcatgtctgctaaattaagtaatgaggagtgtttttttttaaactccaccagggtcgagtttctcagcatataaaaatttgcctttgttttatttattttagagaaagtctattaggacatttaaattagtgagaataattttctttctagagattttgaataataaatattttctttatctttactacaaatgtgctcaaatgaaggaagtgtttattacttcactcttggaaaaaacttcataaagtattttattttcttcccagtgagagtaattgactgaaaaagttcagcaacaggtatttctaactgacaaactcattctccaagacactttcttcaaacttgctaattgcagcagatttgtccctttgtgaggacagtaggtggcactgccaccacaaactatcatggctaactgagtgatttcactgggcaaaaaaaggctagaccttttaggattctcccgtgtcaatgtacacctaaaaataattatataggtttttctcttccataattcactgctgggtgcaaatatctggaatttatttctgttcgtgtgtgtgtctgtgatagtgtggtcataagtgtgtggtacaaatcctgtattgcaaagtttgggctgactcatgcaggtctaactgaatcccctgttctaaactattagctaaatataagtagctaaaatgcacttaatatttaagtggcattctgggtgggagatttttttttcatagacgagccttcagtcttgctcacaaacatcaaactccaagttcagagccaagatgaaagagaactgtggggaaatttcattaaataatcacataatccaggctccataggttggatttttttaaaataagtttcctatgtaattgagttaaacgtaaatttatgcatccaataaaaaaccactgcaaatgggaaaacaaagacattgctccaacacttagaaaattaaattcagcaaaccgtgaagtctactgtgcagttatttttgtgaccaccataaattgctttacaaaactcttctgctgcagtaaacaatccaagaagagatttactttatagcatgcattcagtttccaaaggaaagagtggcctacaagtttatgactctttttttttctttctttcttttttttaaaaaactacttgtgtttctagttaccttgaaaccttcctccccttacaggagctcagaaaggtccatggaaaataagatccaggtctgcagatacaccgtgccctcaaatactcatttctggaataagaagaaacaatcctactttgtggaaataaagtttatatggcaaaaggaaaataaagggttttagtactaaatatttcaccatatttaatagcacctcagagcccaacatagtgttagatgtttcagacagtcagcttgaaatgtgttcgcttacagcacagtacgaggccgaattcaatgcaaactgctatagataagagttttaggggtctttaatcacttctttctcgtgtccttgatggaaaaaacagagctgcctttgtgctaaaaagaaggacctgttgtttccagattcaacaggtcatttttataagaacttcccagaggatacaacataaatgacagaaacacaaggggatattttaagtggctgatgattttaaatgatatatcatctatattaagggaaggttgtttgttttttctttccaacaaatggaaagttactgttttaaaagtgtttaatgttcaaattctatttttagggccaaatcttttctctctgagtggattgactgtaaattcggctcctgaaatcaatctgagactgcaattggcccctcaagtaaataaacttgtcaaatcatatccatttctgtgttggggatgaatgattaatttaatgggctttttgaaaatacctaaattatgttgtaatttttgtaactgtttcagttaaaataacaaagagaatgcatcttttatgaacaagataaactttataaaatggaaaattctagcaacataatttttactggtactttgaagaaagaaaaaaaaagccaatatattatggcaaacaaaatccaggcgacactagctttattagaatctggctgattttattattaaaggtggtctgaatttgaagagactggcaaatttaagattaagatctaagccagacttatttcctaaactgtattggcaaagttgtgccaatgtatttttctctctgttgtcttcttcttttaattggctaccttatttgtaaagaggattgaagatctttagaaaagtttctgtcagtcaaaagacaaaagttacttttccctgcaaatatcaaaagcactttacaaaactcattccttgccctcaaacaaaagttattgccaagcgtcctttaaaatacagtgcctggttgctttcccttgctcagacagacatatattttccaaactacccagattctctggttcttgacacttttactaagtctctatattacttcccacctaggacaactatctggcaaaaggtcaaggtaaataaatacctgatggtaaagactgtgttaaccacaaagaactttccaaaagataaagaatgaaaacgggcttccttgggaaggagaaggcaatctattaattgttgaacaggtttctaatttagaagagactttttttttttcctttagttaaatacatgaatactttcgcagagcaggagaaagagaccagactggctatttgctggcaagggattcccaaggatgaaaattatgaaggccagaatttccctcccactctctccttcaacatccacttcccaggaaggagaaggcggagagggaagaaagacccttgacgacccttcgccttctgcatgaagtggggaggagggcgaactgggggtcaccgagggctcctccacgtctttcccagcccaggacccccggatccttcagccccagcccgggcccgccccgctcaccggtaccaggcgaggcccttgtcgtagctgcggtcgaagaagtggggctcggcgcccacggcgcgcacgtcggggtgcacgcgcaggaactccagcagcgcccgcgtgccgcccttcttcactccgatgatgatggcctgcggcagctgcttgctgccttcgtccaggagcagcgccagggtccccggcggggcctcggccacggtgcttccggccccggagccgcccggaccccctgacaggccaggggactcttcttcccaggccgcctcctcgccgtcgtcgcggggcgcgggcggccggcgcctccgccactgcggcagttgcaggaggcgctttctctgtgccgccgccggccacaccgccagctccctcgggcctccggccaggacgccgccaccaggggcccccgcctcctcgccgccgccggacagccccacgacggggccggacagggtctggcagcgctcggccaggcagtagaagacgtaaagggacgtgagcagggagcagagcatcagcaagaacttccggaagatgctgcgggacagcggctcggccgaggtggagagggcactggccgggcccggaggggccatcctagccggaggcgacgtcgggcaacgcgccggccatgctaggcctggaccccgacaggtgccagagcatccccccggcgggccagcgcgctggacggaggccacatcgccgtgcgcccctgtggccgtgcgaactgtcccgggaggcagcggccggggctccgcggggaaacggaatcccgggggccccgcgcaggatccctgcctccagtcgagggagcgggaaggggaacgcgggtccgtgcttaagaaaccatcgtcttagactcgcccaagtcctgagcttggggcagccttggcccctcggttccccgcaagagtcgccggaatcggggtcttggcagcggtgtcgaaggcgtgcgtctcagccccggccccgagagacttctcggcgcggatctccgctcagcgatcctgcatcactggctcggtccccgtgagggcacgcgcggctgccgggcctctgcgctccgtgcgctccagacagtggcgagcgacagtgacttccagccccggctttctctggtccccttgcccgcctgggcgcgttctctccgcccgagttcaggttctctcagccaaggagcgaggtccccccgagtccctctgcccgagcgggagacaggaggcccgtgcagagccgtccacccctctccgtagcgccgggttgctccaaactgctcttggaccccacctgtgagccgcgtggctgggctgggctgggctgcgcgggacctgtcagcggcccccgccactctgctcgcaggcgctcaccggctgcctcctgggccgccgctggccgccgccacacgtgggacgccgagggcagcaaacttgctggtgacgtcaaaggcccgggccggaccagcccccggacgagcgcagcggggcgcggaccagcggccaggcggggccagacgggcggggtgggatggagaaaaggtggcgcgggctccgcagcagccgcccaatggcactggagagggcgggggcggcaggggcgacgccccttccccagtgtcccccattcctccccgcggcttcgcccccttccagtggatccggtgtctgcggcggctccggggttgcctgagtgacagctaaggccggccggatctctgggggcctgacttccacccaagacgccactagcttggtgaggggccccagagctctccaccgcagctcagccctccgcagccctgaccctccctctccaggttccccgcgctctgctcccctcttggcactgttgccctatccttccccatcccactgctttccatcgcctggaacctactcctcgtccccttggaagttttgtttgcagcagttcccagtactgcgctgcacgccacgcccccgtttgtctggagcaaaccgaattcctctgcagcagcttggacttctacctactcaactgtctgctgcgggtcttggagcaaagctctttctcgtatcagtctgttttttgtttgtttgttttcttttcttttcttattttgattgttttcccttggatttgtataagatgatacagtcctccagggcctagaaaggaacaacctcttacgaaaaaaaaaaaaaccaatgcataaatcaaaggcaaaattaaaatttaaaaaaaattcaactccgattccaagtccctatgcccaatttttaatgtagtgtgtatttccttaatgttgtttgtacttttgtgtgtgtgtgtgtgtgtgtgtgtgtgtgcgcgcgcgcgcatgcacgctcgcaaagaggttaaatgtcctttcataaactgcggtttcctctttcccttgcctcccctgaccctatatcctcttcgtgcgctccccggagagcaggtcaggaagggatacaaaccgccttgctgtctaatggagggaggtggcccgtggaagctgcatgaggtggttttttgttctaatcctatttgttccttattttttggcttccttgcctccacaggttgcctcaccatgtgggcggtagcttgggagcttcttaccagcccctgcaagctgtggaggcagctttctgggacctctgcgggtgctaacaagggcccaccgcaggctcaaggtccacggtgcaggaaacttaccaggcatttctgcgtccccatgcaggaacttcgcagcctttctgtgctctatttgaccacggaagtggaagtcagcttccactttttcagcttccaaggggcacctagtggttctaactctgggcttgcatggatccatgaatttgtgccctgctagataaatactcactgctggatatggtttatggttttatgtttatgaactaccaatcccaactgattcgacaaccagtgaagagctttttagattctgatgccgtaaagcgctgggcgtttacgaggatggacaagccctgccaagctgtaatgtccttttgtgttctaaaattggatattgacaaaccagttgagatctaatgctaacttaaactttcctgtgttttcacattttttccctaagtacttcagtcagatttgcagaaggaagacaacaaaacaaagaccatttttaagttgttttgaaggcatgcagtcccgtgaatgcttataaacatgccccagtttcctggactggaaaatgatggactcgaagttcccttctagctccaacatgacatcatagcatgtgtttagtctttcactttctgagcacaggtctttcctttacgtgggtattaaagatgctcgatgtaggaaacatggttctcaccatcacttgcatgacatgtagggcagctctgcactttagaagcaaaatgtgagccacaaataaaagctgcatggataattttcaatttctagtaatttttttctgtgttttttgaaatggggtctactgtcacccaggctggagtgcaatggcacaatcttggctcactgcaacctctgcctcccgggctcaagtgatcttcccaccttagcctcctgagtagctgggactacaggcatgtgccactacacctagctaattttttgttgttgttttttgtagagatggggttttgccatgttgcccaggctaatttctagtaaatattagcaccttacaaaaggttaaaaaagaagcagagaaagttatcttttcataatatgtcccatacatccaaaaatgtgactgtaacatgtagtcaatataaaaatgattgaagtcatgtatgttctttcttttcatactaagtctttggaatccagtgtgaatgttacacttctgcacatctcagttgggactagccgcatttcaaatgctcaatacccctaggtggctggtggttaccctagtaagacagcacaaatggggatgttgttttggtgggaggggtgaatctgtcagggtcttaacaggaatcagacagcacattcaaattaggataatgcacggagggtttatttacaaaagatctgtttataaaggactagaaaagacaacaaccctagggtagtagcactggcgctgtcactacccttatgtctgaaagaatgagggaaaggaagggctaccaaaaccaggagggaaaaagtccatagaagaggcccttgagagtggcagcaagctttcgtggtgacacacagcctgtccaaggcacctcttaggaaaggaatcagggaaagaaatgttcttgataagacaataggggataggtatgtggcattatgtttaatcgtgacgaaaatcaagaagggtgattaaagtctcatcataaaattaggtacagtcacgctacatagccttttagaacatgtcttctttcatccacttagatgcttacactagaatagaaacaagttggagctgttgattactatggttctttaatggggaaataaatgcctaccaaaataccaaagagcgcaatagactttgttgcacagcttcttcttgttgttccctttctctttgttattccatgtttattagtcaaggttctccagagagatagaagtaataggatatatggatatagatagacgtcaatatagatagatggattagagacagatgatagagatagagagatgagaggtgatttactagggaaatggctcatgtgattatggaggctgagaagtcccacgacaagccatttgcaagctgcggaccctgaatgctggtagtgtagttcagtccaagtctgaaggcctcagagcccagaaagccaatggtgtaagttctgagaaccagaggtccactggtgtaagccttggagtccaaaagcgagacagcctggagttccgatgcccagtaacatgagaaggagaatgtatcccagctccaggaggtagataaagatacctttggccgggctcagtggctcatgcccgtaatcccaacactttgggaggccgaggtaggcagatcgcctgacgtcaggagttcaagaccagcctggccaacatgatgaaaccccgtctctactaaaaatacaaaaattagccaggcatggtggtgggtgtctgtgatcccaactactgaggaggctgaggtaggagaatcgcttgaacccaggaggcggaggttgcagtgagccaagattgcaccactgcactccagcctgggtgacagattgagactccatctcaaaaaaaaaaaaaaaatgacacattcgccttccctccgtttttgttctctctaggccccccagcaagttggatagtgcctgcccacactgagggtggatctttccaacctagtccactcagactcacatgctaatctcctctgaaaacatccttacagaaagaacccaaaataatgccttccctaggtattcctcagtccagtcaagttaacacctaaaattaattatcacatcatgttaaagcatgctttcaaaacccttgaaagcaataaggctctgccttggaaaaagctccaggtttatcttgctatcacagaagctggtcttatgcttggtggtgaaatgggtgaggtctgtgttcagtgactttcagcttccctctctgtacccttctggcttccttactgtgatgcctactcttgcaatgccacccagggtcctctgaagcctcccaccttcaatcccttcccagacctggatcttataaacctgttattctaccgtacaagcattgcttaccatctctcatgccctaccacagaggtttaacattgtaaagtaagtaatatttttaaagaggactcactcccactgacccatatattaatagtttatactcatttagaaaacttaatatacattaatatataacaaataaaacaattacatccatatgcacatccacctctttctcttcctctctgagagagaggtggatgtagatatatgagagagatagattgacagattgatcaacagacagaaatacagatgctttttagaaaaatactaaaagtttctagtagcgtggagaatgtggagatcacccttcggccacctgtaataatgcgcataattgatgtgcatgaactcatgggtagtcctgctccaagaatttagagtgcttcaccgaagattttgtacctcccctttccccaaagacccacatatctgagaaacaacccttacggctctccagagccctgctcctttcctatctgtctctcagtcacatccctgcctccatcgcctgccaggctaccacacaccagccaaaccaacacagaagccaatgagctcaggagcccattgatgtgatctatatcaaggtcaggatatagattaagggtaaaaggcattcagaacagagtacgtcccacaagtggggaaacagatttaagagcttataagcttagcgagccaaaacatgaacacaccccttagaatgcaaaattatattgtattcaataaactatcagacttcatgttccacactcaccagattcattttcaattcacaaatttcacctgtttctttctttctttttttttttttttggaggcagagtttcgctcttgttgcccagactggagtgcaatggcgcgatctcagctcaccgcaacctccgcctctcaggttcaagcaattctcctgcctgagcctcctgagtagctggaattacaggcatgcaccaccacgcctggctaattttgtgtttttagtaaacgtggggtttctccatgttggtcagactggtctcgaactcccaaccttaggtgatccgtccgcctaggcctcccaaagtgctgggattacaggcgtgagccaccgcgcccagctgacctgtttctttctgatttgaggcacatggtgtttctacctagaatgcaccgctcccctaccccaacctgtccttcagatatcagctcgaaactcatcttcaaggatgttttcctggtgcatttcttgccccccggtttgatgagatctcctggtatggattctcatagtgcccagcactgttccttacagactgtatgagagtttcttgctatatagatgtgtggttgtgtctatgcctcccccttagactacaagcacaccaagggaccctacatcgttgcccattagtatacctagaacatctagcttattacctgtttaaggagatgcccagtaaagatgtgttgaatggactcatgcatccagaggtggggcagggcctgagcacactgcatagaaaagccaagacgccggcgcagtggctcatgcctgtaatcccagcgcttggggaggcagatcacctgagatcaggagtttgagaccagcctggccaacatggagaaaccccatctctactaaaaacataaaaattagcaggtgtggtggcatgcgcctgtaatcccagttgctcagggggcagagacaggagaaacgcttgaacctggtaggcggaggttgcagtgagccaagatcgtgccattgcactccagcctgggcaacaagagggaaactctgtctcaaagaagaaaaaaaaaagccaagagaccagagaggacatggtgtgctgtgaacagcttgtgtttcagtgggaatgaagtatgtgattggcttagtggaggtactgaaggaagctagaagtagcaggaaaataagactagagcagaaatcaagagcagatcttgaggatcttgtacaattttcttgacaggctacacttttgtgggacatcagtggagactgacaaggtcactttgcatttctagaaagctctcctacacagtgtcgagtcagggtagcaggattccagttgggtgaccagttcctattagaagagagcaaaaatgacaatcaattattagctagaaactagagggagatttcatggaggtggtagatttcgaactgggtcttgagaaacgtggggcaggaggggacattgagtcacaagggataagcaccacccaagaggcagtcaatcaatatttgttgaacaattaactataaccaaatcttcacttatccctgttttagtgttaagaaagtgtttgggaccagggtcggtggctcacgcctgtaattccaacactttgcgaggcaggtggatcatgaagtcaggagttcaagatcagcctgaccaagatggtgaaaccccgtctctactaaaaatacaaaaattagccaggcgcagtggcaggcacctgtaatcccagctactcgggagtctgagacaggagaatcgcttgaaccctggaggcagaggttgcagtgagctgagatagcgccactgcactccagcctgggtgacagagtgagactctgtctcaaaaaaaaaaaaaaaaaaaaaaaaaaaaaaaaaaaagatggcttagatgtctatcagtggaggatagttaaatctattctacagggtttatgcagtgttttttttttaaaaaaaatcagtcaatgtatgctcactgataggaaaaaaagaaagtgtttctatccattaacttaagaaagtttcctagaagcagacgttggatttctgcagcctctggggcttgtcttagacttctgcattatgttgtagtctctgttttctgacctacccactcctcgtgttttctgtaggttacgcccaattcctgggaacgaagttaccaaatgagaagtcatgttccttttatcataacattgtcacccaatattttcgcttccatcattctcgctctcaaaacttgcatcaggattttgctgtcagaaaccaccttgaagaccaaaaaaaaaaaaaaaaaaaagaaagaaaagaaagaagtactgaaatcaataaattagtaaggaaccttgcaaaattgtccctgttcacctgaaaaggaatgcagtgaacaaataccaaacttagggccacagttaggctgtgaagattatacccaccttaacatatattttttgtatttttatattttttatgttatgctttattattgacaaacggaaaccatttgcttctctgaacttattttaatcacattccaggatgtcattcgcatggcagtcattgcagatttgtaatttataatgctaatgttttgtcagatggcaataaaatgtttttgaagaagcagtacttgatctaatttgcacagtggtgtcaaggggactcacacaggttctagcactctcctgacaaaatttgccccagacatgtgcgagtcccggggaagagtgctttctgctatgtgtgttgagaggcagatgagagttggggagcgatggaagtgaatagctctaatttttctctccccctcttctaataacagcacccagattttcctcagggcagatactcttccctggactcatatcacaaaatcctaataaagccagcctcaccctctggctttagttgtctaagcagcccagcttcctgtccagagggtttggtttaaaagatgcaagtaaatcgagtcaggctcagaggttcaactctaggactttgctgcaactactgaaaaagaagtgctcttctccctgggctgctggactggcagggtgtaaacctgagctgctggttatcatgttttcctctctgattgaatcaacacaggaatgcggaggcaagtaagggagagagagattccaggaaacttaatctgaggccctggattcatctctaccctggagcttgtagttacatgcgctgataaattctgttgttgctgttgtcattttcaagatacattgggatgttagaataccaggtctctctcgatttcaacagatgtggttttctccttgttttttttttcttgagacaggttctcactctgtcacccaggctgcagtgtagtggtgtcatctcagctcactgcagcctccaccatctgagctaaagcaatcctcctgcctcagcctctcgaatagctgggactatgggcatgcaccaccagtcctggcaaatttttgtactttttgtagagatagtgcttcaccatgctgcccaggctggtctcaaactcctggcctcaaacaatccacccaccttagcttcccaaagtgctgggatcacaggcatgagccaccatgcccagcctaaatttggttttctattctaacctacaaaattccttgcctgcctgaccagacattttcaccggtgatttctttttttccttttttttgagacggagtcttgctctgtcacccaggcaggagtgcagtgacacggtcctggctcactgcaagctctgcctcctgggttcacaccattctcctgcctcagcctctcaagtagctgggacaccagtgatatttttaatgaccccagcgtgtgctgctccatgcccaccaggtgaaacctaccaggacgcacctgctctcacctgtatgactgcacctgttttcctgctcccagcacaccagccagacccgaactgaggccacctagcctgactctagagagcctgctcaactggagttaactatttctgacactttaaacagccatttttatttactctaataggagtttaacacattactaaattattgactataaaacaggagtgtttgcttttgaagtctaattgattattcttatataacaaatatacccgttgctttggattttatgtgcaactcattccaatatagttttcaaaagctttattgttcatgaatgaaaaccatttgcttctctgaacttattttaatcccaacaatattaggagaaaaaaaaggactgatccggacttgcttgggatagaaagctacctggtcccaaaaccttgggtttattgagagtcaaagcacataaaaataaacaaacaaacaaaaataggacctcaggatgttcagtgctcaaattcaggtgtctgatttcttgttctcaatcccaggaataatgaagttagcattttagaaaattgctttgagggctgcatgctggatgcattggaaaaacttgaagtagataacccagtggagatgctatagttaggtgccaggcatgaaatcatatcagcccaaactatgctgtcagcagagcgtgcaaatagaaaaatctaaactatcttccaaagaaagaagcagaaaactctgtgatggggtagataaagcaggtgaaagaaaagcagaaatcaaaagccactccaagtattgccattgaatggttccttcacagttggccttgtgtttatttactggctggtttcatcttctgtctttgcagtcaggcatgctgatgccctgctccaaattgacttggggatgtgccaggaggggtagctctgagtgggcagcagacaagagggcaagcagggacagaggttgggtcaagtcacttttagaatcgaagctacagctttggtcacaagtcagctctcactgtaggacgaagcaggcctgaaatgaagtcacagtgactatttcaattgctgtctaaaccatacacaattcttattaatctcatgttgggggcaaaattctttcctcagtcttgggtgaaatgatgattaaaaatctatcaattgctaaactgtgagttattattgagtgtgagttcgaataaaatgagagagagatcaccaagaatttctaaataagtgaaatttaaataggcccttgtagaagtaagatttttgcagatgaatataagcaacgtgggtgtcccaggttgagaaacaaaacaaatgaaaattattacccatggtaagaattgcttttaccaatattatgaccaaaactctttgtagtttggaccagagggatgatgaggaagggagaggaaacaaggctgatatttactaaaggctgggtattacacacagcaccagggttttcctagcaggtctttctctgagtggatgctcaggtttttttcctgtcacttccagtattgaaagaggccagcatttccccgggtgtaatctttatcctgaaaagtgtcccataaaaaattacgctgtgatgaaataaatttgggagaccatatcccctcttgaacattcctgataaacattagcatattacagtctctgagatgatgttgcagtaaagatactagttgaattcaacattttccaagctttaggaccacgggatctctttgtctatgccctatctggtaacattcattgttctgaggaacacacatcagcaaacacaatcctcagctttatagggattgctattatcaggaacctcagaggatgaatgttttgtgaacatattggggcctcagctgcatatagtgagggcctggtttactttgaaaccaggtggggggatatttcaccaaatatctggaattttctttgttctgttatttctcgaagggcccactttccccaaggaatagggatttaactaaggtcctcacaaatggcaattttcatgaattattgatttggccaaaaataattgaaaaggtttataattacatagagattgcctcatgcttcttgcttgtaccctgagtaaattctttcctattctgtgatatatgcaagaaatgggtacaggttttgaaatatacctcatttaaaaataaattagagtgcaaaaaggtcaagtgacatgtttgagtaaattctttcctactctgtgatatatgcaagaaatgggtgcaggttttgaaatatacttcatttaaaaataaattagtgtgcaaaaaggtcaagagacatgtttgagtctcctgtacagcatccaggttttcaaaattggatacaaaaaaaacaaagcatcagaagaaagaaaaactcatagttggaaaatgagacatattgaaataagtagcatattgctaaaagttgattcaatgagggtgatgtggttattttctttgttctcttctcaatttgttttctgaaagtagagaaccacactttttttgttttattataatattggtactcctttattttaaaggtaccatatgtttttcacagtagattaaaaactaatctttaggtgatcttttgaaggaggtgggtgtatatactagacctgaaaagtaagaggagtttgagttagttttctttgttccccatctctagaggaggcttaaaaacattccttgtgtttcaggagggggaggtaagttagggggaaagtgagagtgaaatgttgctggttcctaagcaggaaccatttctaagccacaagtctagcagaagctggagcaaagacatgggtcctgagatagcctgagggaatgtgaaagcaaaggaggcctgtaggagggccaagggaaggggtgagtctcaaagagccccagagagtcatgattgcagaaaaaaagaacacatgtgatgtagcacttccaaccactctccaggggcccctcaaagctccaaaatggaaaaggcacagaaacaactaaaaagtagccaggtctggagaagccagggtctctgtaactgatacagctgtgatcactatggagtggtgaccaagggccagatggcccatgtatgaataatggcagccaaagccagattccctgtgatgtcttggcattctctaagaccactcaggagacctgggggcaagatcagaggaaatgataaaggctgtgaggtgggggtaggggagagaccctgagattacccggaatggaccaagaaaaacgggccctgaaaatggaaattcagttcaattttcaaaaagcacgagaaagttaatttttacatacctgattgtcctacccaatattttgtgtctgcaacagtcactgaaggagtttactaaatgaatttactaatgggaacctacaaggcataccttaaaacatccatccatgccacctttttcaacaaatgatttttttctttttagttctaattattttctacacactatagatttttgagttatatgattaaacattcagagtgaaagattaattactggtagttttatgcatatatacttaatcagaattaaatacatttttaaagtatggatggttcaatctcctgcagtctaaacagctcttatttaattaagttaataaatatttacagagcttttaagaattgctatactttcaagtcagggctctcttctacactcattgccaaaataatttcctctttatttctggaatacctagtggagacagggacacatcatacacaagtatatagacacacattaatatgaatagctttatatttcctgcaagaagtttgaaatgattgttctcttaggacccatctcatttctcctgctagtaattgatttttttttaagtagaaaaaaaaatgacgaatacagctgagcctgaatattaactgtaattagaataatcattgcaggtgcccctcaggttatttaatattccacttaagcaaattttaccttgagcaggttagttcataaagcacataaaccccctggagatggtagaaaataaatgatattttagagatgatggaaaatattgcattatctgcaaaatcacagaaggcttggtgcacagttgggtaactgaaaacgaagtagacagtggctaccaagaagagaagttttattttctgtgtcccatgcggtttttattccaggtcagatatgggctcagactcttacagtactatttgcaacactcttcccttcactgcttcatcctccattgcatttttgccattggagacaaaaatctaaatgatgtcaaccccaaagcactaatgtccatctcctctcttgccttgtctaatatttcttttcaaattgtactgaaacttctgggacagaatgattgcatcaatttttttttaaatgaaaacacatatagaacaacagttaaataaatgtacatttttagttattattttctgtacagtaatatagcttttccaggcatattgttaagcaattaaagtgaaagattaagtactatattcatttcctagaactgctgtaacgaattaccaaaaactaggtgtgttaaaacaattgaaatttattttctcttagctctgcagactaaaagtcaaaatcaaggtgttgacagggcatgctccctctgaaagctctagggaaggatgtttccttacctgttccttacttcccagcttctagtgcctgctagcatcccttgatgtttctgcctgtagatgtgttacttcaatttctgcatatgatcatcttccctgtctgtgtgcctgtgtcccttctattaaggatacaggtgattggatttagggcccgccctaatccagtatgacctcatcttaatttaaatcttaatttgcaaagattctttccaaataaagtcacattcgtaggtactgagggctgggacttaaaggtatcttttgggaggaccgaattcaagccacagcacacgtgactatgcaattaataataatagctaattaataatgcaataggctgggcacggtggctcacacctgtaatcccagcactttgggaggccgaggcaggcagatcacctgaggtcgggagttcgagaccagcctgaccaacatggagaaaccctgtctctactaaaagtacaaaattagccatgtgtggtggcatatgcctgtaatcccagctactcgggaaggctgaggcagggagaatcgcttgaacccgggaggtggaggttgtgttgagtcgagattgcgccatttcactccagcttgggcaacaagagtgaaattccacctcaaaataataataataataataataataatgatgcaataattagtcaatacaattaataataatagctaattatttttagcttttactatctgtcaagcactgtgttaagtgccttgcaaccattatctcactgagtcctcccagggcctccttgtgtgtaagttgtattagccccatttgacagctggggatattgaggtccaaagaggatgagcaaacatgccagaagttgcacagctgggaggtgacatgatcaagctctctcacacctctgcctaactccaaagccaatattaatccttaggctgggcattgtcctacttaacacaacttactcataaaagatactcttattttatctcagactaaaacacactttttcaactcaatctgcagttccttgttctgtttctttcacacttttaggactaatagaaacatcctcaaaatgttaaaaccccccaaagttttcttctcccagagcttctgctcattctaacttttgtcatttcctagaaaaggcctatagttgattttcctgcaaacttaaccccttctcataattcctggagtgagagagagattgattttgccagtgttactactctgaaggtatcttttatttcctatccaaaaaagggagcattttatagcctcatctctttaacaccctgccctttaactgctggaattgtattagctggggctatgaagataatgcttaactttactaattaaacactaaaagctcaaactcacctctaagctttttacagcttgacctccgacacagaccatattcttttaaaggacttagaatgactaaaatcccagactatctaagaacacaactttttaagactcatttagggccaagtgctatgccttgtgcttataattccagtactttgggaagccaagacaggaggatcacttggacccaggagtttgaaaacagtttgggcaacatagtgagaccctgattctaccaatttttcttttctttttttttgttttaattaggcaggcaaggtggcatgaccctatggtcccaactaccccagagactgaggtgggaggaatgcttgggtgtgggatgttgagattccaatgagctataattgtgccactgcaccctaggctggatgacaaagcaagaccctttctgaaaaaaaaaaaaaaaaaaaaaaaaaatcacgaaaccccatttacaaaggaaaaaatagcatttttagacatagtcatgtcgagacaaaagatagaccctattttgcttgtatatgattagatctctttgtgaataggcagagaaattcaaactgatgtattaaacatcccaaagaaaaaggtaagattagggagagttactgagaaagcaattctgagtaaaattttttacctaatcaatttctctatttgttgtaaggtaacagtctaaccttttttttcccccaaataatgaagtagttttcctgatacctagtctttccttactgacttgaaatgatacatttatcttatgtttgtcacatgtctgaatcctgagccattttattttgttccattaatctgtcattttaatcagaaccacatattatcctagtattatacaattcatcttatgactccaaaccctaaaccaccttctatggactaaatgtctctccctcaaattcctatgttaaagctctaatctctaatatgttggtatttagagatgggacccttgtgaggccatgagggtggggccctcatgaatgagattaatgcccttattagaagagacgtaaggaagatgatctttgcctctaccatgagaggacacagcaagaaggcagccacctataaacaaggaagagagcccttaccagaacccaaccatgctggcttccagcctctgaaactgtgagaaacaaatgtttattgtttaagctccaactgagacactggcatttcaaaatgtctcagctatctttatgtatttattttcctagaaattttaggtttataagatcaagtacccccccaatacttacatttttattgaactgttattacatttatatattgcttgaggggattcacatatttataatataatataattccttccacgaacatggtataccttttttgcctcattcaattaacctagttcatcacagaggaaaaatttttctgtatcttcataaaattcctgcatcatttgttatggtgattcctaagtcatttaggtatacaattgttttgtgaataaatcttttccctataatatttttcacaatgtttcactgatatataaataagctattaacttttccacatatacattcaataattttcgtctttaccaggcccttctatttgtttcaatggtttccagtagacaattttctaatctatagatgatgaaaattttaaatcttctttccaaaaagtctaactcattcatttttttggtcatgttgcattggttacaagtataagaagagtataaaataatagtaaaatagcaggtatccttcttatgttttatgttaataatgaggatgtttctatagttggatctttaggaatgacatttgttctttttctcctacacattcttcatccaattaaggaattagctaactttattgctaatattaaaaatacacattttacaaatagttggattttgtttaatgccttttacaactattgggatactcgcttttttgctttctgtgatctagtagcattttatattacatcaatttgttttaatgttgaagtgtacacatatccccatacttggtaatgtgatattattattatcattttgctattgtatgtgttttgctaggatattatttgggacatttgcagctatatttattcaaaagaccaggttttgttgtatccaatttttgccaggtatattttaatgattaaggcaaatttctaaaatgacatataaactttaaatttttgttgttgtagttgtttactttttttctgtttttccaagaaatataaattacttgtggattatatatttcttgcgggtaatataaaaattattcataaatcaattcaggtctggagccttaattggcaattaaatatttgttcatggttgttttattaaaattttctaccatttcttgaatcagtaattattccttaaaatcattcatgagaagtcagaacaagatggtaaactgaacacactcctccatgttcctacccactcaaagtgaatctattagtttaggtggagggggaggaaaaatagtaacaagtagactagaaatgttgcagaatggatgaaagcaagatggagcatagataaggtatgtggagccaactgtctgtccaaataatgtcggagaaaaccattacagagatgagagtggtctcatgtgattacaatgccacagtcaaggggtgggttccaaacacagaggggccattcttcagggtgatgcaaccctttcccctaccctctcacccacagtgtgccctcgtgtggcccggaagtggaaaaaccctcagacattctggtcctcacgggccaagctggccagagctccaatcccttatcacagtgaccaaactacatagagaaaaagaggcatgaaaacaaggactcttacaagacttgccaaatgttaggctgaacaagtgaaatagccatttttatgggttacaaaacagttagacatcagtaacggcattgagttccacctaatttgaaccaacgggaaaggtcaatacttaattggattaaaagaagaaacacctggagataaaatagctaacagaggaaacaacaacagcaaaaacactttcaataagtaaaattaatatcagagaggatcaagaggttattacactcctagaaaagaggtaggcatccaccttatgactgaaatttctacacagtaaatctctttcccattaaaggaattgatgaacatgaagaaataatttacctctctcccattttaaaatccatcaattaaaataaaaggaaaagagaggaaatctcatttaactagaacagagctggggagtcaagcttaattctgcttctatgccttctggaaaattggcataatcctgatgatttttacaaatattctcaagtctggtgagataaaacagagagaccatctttgttttttattcttctgaccgatgagaggtagaaattgcttctggggagtggtgaaatgtgtgaaaggagttagttattaggtggccccacatactggccgaataaaaacatgggttatagaaaatgttttcaaagacaaacaggaaatagaaaatctgaaagagttacaggaaaagtacatttgtgttgacttctaggaaggcaatttgccaccctctatagaaatagaaatgataaatccctccagaaatttatgctaaagaaatacttgcacttgtattcaaagatgtttatgcagagatgctcaatttccttgttgtttgtaacagcaaaattgatgacatcctaaatatccatcaatagaggggtgattgaataaattaaaaggcaaccttcctgggaaacactctgagggtgtaaaattgggtgagttagatccatatgtcattaactgagtttttcatcaacacatttgtttaagtgaaaaagcaagttccagaggagtacagacagaataacctcagatgtagatttttcccatctgacatggaaaacatgtaaatgcttcagtggggaaaaagaatgaacacccaacccttgacagtggtgtgtttgcttgtttgtttttttgtttgttttgagacagagtttagctcttgttgtccaggctggagtgcaatggcacaatctcagctcactgcaacctccgcctcccgggttcagtctttaagaaggagagtaagagggaaagaatgtggaaaaaaaggcattcttgttttgctatacttaattgttttctttccataataacaatgttttattagcataattacttaataaacattaaaaaaagctaaaattattatatttaccaaatagtgtatgcaccccattctaatttttaaaaatattgtatctatttatgtcattattttaattctcatttagtaacttgctttcagctttattattaagcttgccagagttatacatatttatttattttgttcacaaaagcaactgagaactatatctatcatttcctattttccaattcattgatttttttttttgcttgtaactttgttattttctttcttcttttcttagatgcatcttgtgctgttttagaattttgagcaagaacaaagatcatattttatttatttttcttttttcttttttggtgatggaagtgtttaggattttaagtttttttctgaatggaacattgtccacatcccaaaggttttctatgtgctgtttgtatctaactgacactaacagatgacttgtcttttgccaggcacagtgcaataaaacttatatataacatcccatttaatcatcataacaattctaagaagtgggaactctcttgtcccattttacatgtgagggaagtgaagcatgtctttgggtagccaacacaccgccattcttagtccgtgtgttttgggaaacgtggatcctgcctgaccagaagggtgagtggacacatgaggcagggctaactctttcttggccacagtgataggatcaggatgaggcaagttgcccaaattcagtccattggagtcttccctaaaacttctgctggaactctccaaacaaaaagaaagaaaaatactctttttcatggactctctagctataaaacaaaatgaaaacagataactctttcctcattttggataaggttagcctaagattgaagacaatacaaggataccattggtgatttatggagaaaatgagacatattcctaataatatcatctgagcacttacagcaaaatgtgcctgaagccagaatcagcccttgaattttctggtgatagaagtcaataaattctctcttttttgtttgtttaggctagttgagatgattttctatcacttagaatcaaaacagtccttgcagacagagttaaatcctctcgatcccataattattttttgaatccaaaatatgaccgcaagtaatctaataccagagcccatgctcataagcatgaaactctgttgtctttatttactcattttgtttatttttccgtttatgtatgtgttcactcattcatttattcattaaacacatacgaaattagataaatatgggcttgatcatttacttcttttaaaacaggggaagcagtatagagatctttctagttgttatggttaaatattgagggattttgaataagagtaatatattacaatttacttattgaaaagattactgtagcaatgcatatggaaggaactttataggaacaagagaaggagcaagaatatcagtgtagagacttgttttctgggagagaaactagagtgttattgatgaagacactgataagagaggatatttgaaatatattttggagggagagcaaatgaatctgctgatggatgcaatgtggtgtataagaaaaaagggaaaaatcaaagatggcttctaggtctttggcctgagcaactcagagaatgattatgccatttaagtaaatatttagagaaacagagatagtgcaaaatggctactgaatggttccgggtagaatggttcagaagcaaaaatcaaatatagagatttggtcatactaagtttgaggtgcttgttagatatctaggcggagatgtcaaataaatataaatctgaagatcagaatataaactcagattagagatgtaaatgtgggatccaccaacttactaattgcatttatttatttttatttattttgagatggagtctccctctgtcgcccaggctagagtgcaatggtgtgatctcagttcactgcaacctctgcctcccaggttcaagtgatttacctgccttggcctttcgaagagctgggactacgggcatgtgccaccacgctcagctaattttggtattcttagctgagatggggtttcactatgttggccaggctgatctcaaactcctgacctcaagtgatcctcccaccctggcttcccaaagtgctaggattacaggtgtgagccaccacacctggccctgattgcatttaacaccatggaaataaatttaattttgtcctgagaagagagcataaaacagtataagtagaaaagtgaagaagaccaaggtctgagacctggaatattcccacataaaattaggaaaagaaagaagagtatcttagtctattcatgctgctataagaaaatactcaagactgactattttatgatggagagaactttattttctcacagttctggaggctggaaagtccaagaacaaggcgctgcagagtctggtctgtttccaagacagcagcttaaatgctgcagcctccagaggggaggagcactgtgtccttacatggcaaaaagtgagagaagcaaaagcaaaggccactttctgtgtggaggaattttttttttttttgacggagtcttgctctgttgccaggctggagtgcagcagcaagatctcggctcactgcaacctcctctcactgcaacttctgcctcccaggttcaagtgattcccctgcctcagcctcgtgagtagctgggaatacaggcacgtgccaccatatccagctaattttttgtattttagtagagacggggcttcaccatattggccaggatggtttcaatcgagaagcctcttttataagggccttaatcccatttacaaggcaggcaccctcatgacctaaccacctcttaaaggcctcaccttttaacactatcacattggcaatacctgaattttagaggggacgcactcaaaccatattatgaagccagaaaagaaacacaagaagaagcagtccgtggggttagaggaaaataagtctagcataatgaggtggaggaaaaactagtttcaagaaagatcagctgtgtctactgggtccagtggtgttattaaccaagtagaattagacataagaaatagagtttagcaagatgtaatttattccttagcttggcaataatggtttcattaaattattatagtgagatctagagagggcttcatctttttcagatggaaaaggaacacgtgtagcatgtgtgtttcttgatggcaatgctccaattgagaggaagagcattctaggtaagctagagaaaagtttggcaaacaagggagggcagagaaataggctggaaactggaagggaaggttgaggagattttttgaaagatgagatctgttgtatgttgtatgttatatgttatatttcatgttgacaagaatgactcagtccataagggaaggacacaattacaggaactaaggccttggtgtttcacagtgggcaaacctaccccaaagtccaaggaagctgatagccttaaaaaaagaggctgacaaatccagcttcttagaaagaaacagttcatagggacttacacacagaagccaagtctgtgtcccaggtaatgtcaaggcaaaatggtggatcctggtgccattactccccagagccagggcttatataccactggaaaagggtaattcagaagggatatgtaggacaactgaagtatgacaatatcagtgttgtttgatctaagggcaggatttacagtaaggaggcattcttatataaggaggaatagataaactggaaaccttagagatcttccaggaacaggggttcatcagaagtcaacatggtgattagcatccaagataaagctgattcagttttcatactggggtaggtgagaagtaaaaagatctcatacccaagaagagaaaatggcccggggcacaggtagattaaggcaaagtatatgggtacaggtacaggtgaatctgacatttggtggtagaggaagatgaggcatggaattctcttacgtaactttcattttaaccattccatcaccttctattgttcatgctaacttactcaggaaatcctatttcagtatttattttatctcaccaagacctcgaatgcgcttttctcatactggtgtttcactgttcatttctgttttttcaaggcaggcttatagggttgctgctggaggaggcttgaggtagggacagaaggtgtgttcttgaggtagggacagaagacgtgaaattaagggggaaagtgaattttctgggaacttcagaaaagacagcccacctggcatttgtgctcacaaactttttaatacaactcatcagcccagtttcatttgcattttcttgagctgtgttcagatgcctgagtgtaggttgaaatagatcaagatttgggaccaaccaaggtgtaattttttaaacaaataactatgaagtaaaagaagaaagggaatttaaggaggaaacatgggagagatggaagagattgtaagaaaaactgtggaatctgagctgattgggagaaaggaaaagacaccagaggccaggcgctgtggctcacgcctgtaatcccagcactttgggaggctgaggagggtggatttggatcacctgaagccaggagtttgagaccagcctggccaacatggtgaaatcccatctttactaaaaatacaaaaattagcctggcgtggtggcaggcgcctataatcccagctacttgggaggctgaaacaggagaatcgcttgaacctgggaggcaggggttgcggtgagccgagattgtgccactgcactccagcctgggcaacaaagagcgcagctccatctcaaaaaaacaaacaaaacaaaccaaaaaaaaaaaacaaggaaatatcaaacagtggaaacagaagaatcaacatacacatgtgaggaatgaataaaaataggatgcaatgatttgagggcttttggagatagtacagttatgggtaatgatgacaaggcagtaatgttggaatttttttgactttaacttatggtaaaaaatcttttttcttttcttttcttttctttttttttttttgagatggagtcttgctctgtcacccaggctggagtgcagtggctccatctcggctcactgcaagctccacctccccagttcaagcaattctcctgcctcagcctcctgagtagctgggattacaggcgtgtaccaacacgcctggctaatttttgtatttttagtagagatgggttttcaccatgttggtcaggctggtctcgaactcctgacctcaaatgatccacctgcctcggcctcccaaagtgctgggattacaggcgtgagccaccgcgcccggcaacctacagtaaaaaatcttacatgcaattcaatatacatacacatgcttacatccctacgtgtataattaagtttcacaaaacactactgatcattaccactgagacacactaagataatgccagaaatactctggtatttcccatctattctatttcattaaaaattgcaggttgcaacctactatattttagacgtattgttgggttatggcttgcagtttgtaaagtgctggtcttaggtatgactatagcagtaggtagcagaaatggagtgagggaaagagttggtggaaataaggaggtcaaacaacaggagcaccaggattggggtgagtcatttatgtggatgttgaagtcaccacaactgatggtgagtcattatattttttctacatagactgtagccattatccacatgtaactatttaaattgaaatgtttaaaagttgtattgaggtgtaactgatatacaatgaaccatacatgttaaagctgtacaagcaatagcttttgacatatataagtatacacagtttatgcatccatattcacaatcaagatactcaacatatcattagcccctttctacacctacctgctccatcatcaacctacttcccagaaaatctgatctgttttctgtctctatacattactttgcattatctagaattttatatgaaaagaataatacattatgtgatctctacagtctgactttttcagcataattagcttgagattcatctatgttgttgtgagcatcgattactttctttttattgctgagttgtagactattttaggatattccacagtttattcattcacctgctctgaacatttgggttgttcccagtttggggcaaatatgttgctgtaagcattgctgtataagactttgtggggacatacgctttcatgtctcttggtaaatacctagcagtaattgctggatcatggtttctttttaactcatatattttctatttcagacagagaccgacatgctatggcctccgaagaaaaattgatacacaaataaactggtcttttgcctagactgtgtaaaccagcattggaatctgtgtaattgcatctctgcctgtttgcatacataaatgaacatttaatctcccactttccaatatcatagttaaacatttgcctgagatctgtaatttaaatccgtacaattccaactccaatatctttctaggaattctattaagagaggctaattgcctttaatgaggggatatactacttttctttatgtatgtttgtaattgacacttgaatgctttattttttaacatgacaaagatattaactcagtaatttacatatactgggctgagtttaattcaaataaggacactgatttgagaagatagtaaagtaattcaagttattggtgaatgattagcaaatatacattttaattacatccatgcagaggagaagacaatatagaagtggttcccaaatatcagtttgccttagagtcacatagaatacagatttctggctcccactcagagtttctagctcagtaagtctaaggtgaggcagaaaatatgcattcctagcaagtttaagctagggttgctggatcacagcttgtgaacccctgtagtgtgattacacctgtgggctcacctgtgttcaaatcgccacacaattatctagcacctgtgacaccttgggcatattactctaagcctcgtcatctctaaaatggacatgatgttaataatgccatagaagaggccaggcgcggtggctcacgcctgtaatcccagcactttgggaggctgaggcgggtggatcacaaggtcaagagatcgagaccatcctggccaacatggtggaaccccgtctctactaaaaatacaaaaattagctgggcatggtggagtgcacctgtattcccagctactcaggaagctgaggcaggagaatcacttgaatccaggacgcagaggttgcagtgagctgagatcatgccactgcattccaccctggtgacagagtgagactctgtctcaaaaaaaaaaaaaaaaaaaaaaaatatatatatatatatatatatatatatatatatacacacacacacatatatcatagaagattttgtggcagggtaagataatttacataacacactttaagcagaatctgttagctgatactttaattataaacttaaaatatatggtaacataaatcaccgaatttaatgtgatattataaaaacctagagcatgatataacaaacaagagacaaaaagaccaaactgtcaatgaacagttttattttgttttgtttctcaggaaacaaattcgaaattggaatctcttccatttctttcccatcttcactttctccttccaatagcccttgttgcctcctggcaggtgtaatgaggtcaggagaggtcagaagatttttaggaagcctttcaattaaatttcttggcacctgtgatgattgggccaataatctcttgaaaacaatggtagctttttctatttgatccaaaatctacctgtcaccataattaactccactggcacaaatccctgtctcatcaatccagtcattaaatgcagctagttcttactcaagtgcagatgtatagaaaggtcaagacctattaatattaataagacccatacggcataatatatgaattatgaattattaaactaagggcaaaaaaggcttgtaaacattttgctagagtgtaatatactcaggacaagaatcctagtggaggccgggccccatggctcgtgtttgtaatcccagcactttgggagactgaggcgggcggatcacttgaggtcaggagtttgaggtcagcctggccaacatggtgaaaccctgtctctacttaaaaaaaaacaaaatacaaaaattacatgcatggtggcaggcgcatgtaatcccacctacttgggaggctgaggcaggagaatcacttgaaccctgtaggtggaggttgcagtgagccaagaccacactactacacttcagcttgggcaacagagtgagactccatctcaaaaaaaaaaaaaaacaacacctagtagaatactaaaaacaattaaaacatatatgaaaagcttgaaaagacttatttactctcaggtatccaaatcaataataataatagtaataataacaatttattttgttcatttatccaacatttattatgtgacttatatgtgcagcatactaaggatagagttaagaacaagaagggcctgggtgcagtggctcacgcctgtaatcccagcactttgggaggccaaggcaggtggatcaccaggtcaggagtttgagaccatcctggccaatatggtgaaaccccgtctctaataaaaaaatataaaaattagccgggcgtggtggcactcggctgtagtcccagctacttgggaggttgaggcagaagaattgcttgaacccaggaggcggaggttgcagtgagccaagatcatgccactgcactccagcctgggcaacagagagcgactccgtctcaaaaaaaaaaaaaaaaagaacaatagggataattctcgctgtcaccaaaaaggtggcctgaagaaatatataaaacaaaagcaaatacatttaagtttggatattgaatgatgactcctatgatgaaagtaaatggacttgtagggcaaacacaccccatagcaataacttaggcatacccttagattcaccctgtatggcacaggcatctgaatgtgtgttccgtgcttgggaaactgggcatggccaatcgggagatccattccttgtctatgaggaacatccgagcacccatgggccatacaggggattgagctcctgagttttgggttaaatgaaacttaccaggaggaggtaattaaggggagggtattaggtgaaaatgtcatataaactgcatgctctttgcagggggttgcagtgttgctgcctagctcgccaccactagactgtaggtaaggcaggtatcttgttcaactcatcgccactggattctgtaccctgtatgtaaacccctgataataccccaagtataagttcatgtcctttgtagggacatggatgaagctagaaaccattattctgagcaaactattgcaaggacagaaaagcaaacacctcatgttctcactcataggtaggaattgaacaatgagaacacttggacacaggaaggggaacatcacacacctgggcctgttgtggggtggggggatgggggagggatagcattaggagatatacctaatgtaaatgatgagttagcgggtgcagcacaccaacatggcacatgtatacataggtaacaaagttgcacattgtgcacatgtaccctagaacttaaagtataataataataaaataataatagtaccccacgtctcatttgctggctctgggtttcttctttggcctcttgaaactgatgcctctcctattagggttagtaggaattcagcacaccccacataatatgcagggatagagggaaagaagtgatataaaatctattgccggggaaagccagcttctttattgagcatttattacgttacacattcagctagtcacactacacataatatttctaacatttttttctaccacaacctctccaagcattattcccaatttgccggagataaaactgaaggttagatatttaaattaactttttcaaagtcacccacctagaaaagggtagtgctgaatctctatctaagattaaataactggaaagaccaagtgtctctgattcctgctttgtgtggctactcattagtattcactatcagacattcattttaacccacactactaccacttaatgtcataggtattagctgtgtgctggatgctttctctgtatcaagtctgaaccttactgctccactctatgatcttagaactgctggaccaggttcagaactctcaaacccatgtctgcactctttccactccactgtgcttgcagttgttcaaaggccgaaggcgtgccccaaaacatttttaagcaaatgtcctttatcaatttggttactacacatgacttcacagccagcatttgccaccagcccacagcttctattgcataactaaccttgccaggtgtcccatcagaatgcttggatcaagtagcaattttaaatgaagtgcaatatcattactcatacagctgctgaaatttaactctttaaatttacttcaccaaactgacataatgaggatcacagacagaaggaaatcagtataaatgatatcttcatgtacatttgaatcatggttgagtcataatctaatattgaatcacttagggtagaactcttaattcagtgaagttatcaattaaaaaaatccttgcaacttttacacagatgaaattctgatcacatgccattggagaaacaaacttggatatatcagatttaatctaacataaataaaagagaacccaacatttatatagtgcgattttagtttcttttcacatatcaacttttttgatcttcattaacaaccttacaacgtgataatcagtctcattttaaggtgaaagactggctgggcgcggtggctcacgcctataatcccaacactttgggaggtcgaggtgggcggatcacaaggtcaagagatggagaccatcctggccaaaatggtgaaaccccgtctctactaaaaatacaaaaattaactgggtgtagtggcatgagtctgtagtctcagttacttgagaggctgaggcaggagaatcacttgaacctgggaggcggaggttgcagtgagtggagattgcaccactgcactccagcctggcgacagagtgagactccatcaaaaaaaaaaaaaaaaaaatgagggactaaggcacaaggagattaagtgatgtggtgggtggtcaggatttgaaccctgaatatccctaagaactacaaaattctatatcactttgtacaagcctgcaatgtggaagtaagcattaatgttagaatagttcagcttggttagctttttactctatcttcctttttcttctctttcctgacattcactttagactaccttgtttgtgtcactcttcaaacaaggaagggaaaaaataagaagtaattataatattgctaaactgaaaaagctatttaaatagcctctgaaatttagacatctttctgtcctttgcaatgacattttctatatttatttgaagggaaaaatatatttctaaatcaatacactggacccattaaaaaaaaaagagtaggagcaaattcttatggtgaggaaaatatgaagaggaagttatattcaggaagcctatcaaagctatgaagttctaaaatattagttaagagagaaagagtgagaggaaaaagtactgatgtgtctatatgtacaattttttgaaacaggactttttttttgtttttgttgttgttattgtttttgctttttttgagacaaagtctcattctgtcaccaggctggagtgcagtggcaggatctccgctcactgcaacctccacctcctgggttcaagtgattctcctgcctcagcctcccgaacgagtagctgagaccacaggcgcctgccaccacacctttttgtatttttagtagagacggggtttcaccatgttggccaggatggtcttgatctcttgaactcgtgatcctcccgccttggcctcccaaagtgagccaccgtgcccggcatgaaataggactttaaaaaagcatttttgaaatgttgaaaactcagaaagcaataaaatatagtctttttaaagtaaaatgatttgcacataactggggttcagacagggcaaatgatgaaaatagctgatgagactagtctacctagagaaaggcagagatggtcacctggtatcctcaaacaacctagatgtttttacttaacctggttgtaaccacagacttgctagacttgcctacatttggttgaatcaacacaattcctgcccaaaagtataattttttttttttttttgagacagagtcttgctctgtcacccaggctggagtgcagtggcgcaatctcggctcactgcaacctccgcctcccgggctcatgccatcctcctgcctcagcctcccgagtagctgggactacaggcacctgccaccacgcccagctaattttttgcatttttagtagagacggggcttcaccgtgttagccaggacggtctcaatctcctggcctcgtgatctgcccgcctcagccttccaaagtcctgggattacaggcatgagcccccgcgcccagcccgaagtataatgtttaaagggagttaaggagttacgtaaaggatgatattggtagttagattgtccacacgcttctcaaggtgaagaataaaaatgaaggactcccaggctgtttgtaattttgcaatgatgtggtaagaaatgagtactatccatgaatgctatttttacatatccaaagtttcaataaccagatgctttttccatgccaatttaatattctggataataactagattctccactgatgtaataataagagctatatctgttaagtatttctcagggagtatgtcaaacatcttaggcatttaatcttgcaatatttcctgtgacctaagtgttattatctcctttaagtagataagaaagctaagtttaaatttgttttgtttgccttgtttctctttatgttagagaatctttttatagtctccatatttattgattatgaggatgatgtgtcagagactgcaatcacgcatataggtaaagttcaaaggaattcaagaagaacttactcaatccactagaaatcaaatataattcctagatagaagtctcatcatgcatgcatgagtaaaaggaaatatatgtttaaggacactataaacagagaaaaataaaattttccaaatgacattttatggtatatttctctggtatattttagagtacattcgcttggctctcaataaaataaaataacatattggctcactgaaacaagagataagaatgagatgaggcagggtgcagtggctcacgcctctaatcccagcactttgtggggctgaggcgggcagatcacctgaggtctggatttcgagaccagcctgaccaacatggagaaaatccttctctactaaaaacacaaaattagccaggcctggtggctgaagcctgtaattccggctactcgggaggctgagacaggagaattgcttaaacctgggaggcagaggttgtggtgagctgagactatgccattgcactccagcctgggcaacaagagtgaaacttcatctcaaaaaaaaaaaaaaagaatgagatgactagataaactgagattaaaagggagactctgtaggacaaaacagaaataaataagaagcttgataatattaatatactaaaaaggtgataaaaacaaaagaagtgaaaacagaagcagtgaaaacaaaatttatcctcaagaagatagaattcgaaaatggagagtaaattggagaagttatcccaggatggcagaaaaaagaaagataattaaaaacatgagaaagatgatagaagtggagaacaaagaacaaagattgaatatgtaaatctttagtgttattgaggggttctccagaacaaatgcaaccaaaacaagaatttaaaacatgggagaggctgggcgtggtggctcacgcttgtaatcttggcactttaatataccaacgcgggcagatcatgaggtcaagagattgagaccatcgtggccaacatggtgaaacccgtctctactaaaaatacaaaaatatttgggcatggtggcatgtgtctgtagtcccagctactcgggaggctgaggcaggagaatcacttgaacccaggaggaagaagttgcagtgagctgagattgcgccactgcactccagactgggcgacagagcgagactccatctcaaaacacacacacacacacacacacacacacacacacacacacacacacgagaactttcttgagcagaacaaagcaaaacaaagcaaatcctcagataaaaaggagttaaaaaaaataacaaaaagagagtacttgaaaaaatcaggtagaaaggaaaggctatctaaagatgatgaaaaatcaactagcctcagagcttcctacaactttaaatgctcttaagacaatggagcaatgtgtgtaaagttttcaaggaaaactattttaagtaaagtattatatacctattaaaggtcttttcctcacagaaaagtaatataatgattatacgtacatatatatgtatgtatatattcagatatccagaaagtattatatattcatattgtcagccttaaataattagattcagaaaatatgactaatatatcgagtttattcaagtggaaagcttgagaataagcgcttgggaaatacagactccaaaacaatgggtcagcattccaaagtggggaagttacagtttcacttatataggcagttaacaggggttgcaacgttttccaaacaaagtcagtacctacgctgtagcaatttgattacagcttgctacatttcaagaatgattgctttaacattctgtgaggaggagtgacgatctgaggaggtcttatctcttatgctacaaagcctttcctaatgattttcaggaaaaagcaggagttacagctgcatgttaggtggctcaggccaaatagcctcattcatctcaaggctcgaaaaataatttaaacttccaacagttttaagtttgaattatttagtttcataatatttattgaaaaaaatgtatttgaagtagaagtggaaaagaaacagaaatggtttttaaatggctgatacggaatattgaatttttttaaatattaaaatttttatatatagttagagggttaaatttacatgaggagatcagatatgacaatataataagttgaaaatagaaaataaaatatgaaatataatgtcaataaattctgtaagtaaccttgataacaggtattgagaagcttcatatatgtttaatttaaaattttaagaaattgaggaaaggtggaacttccatatatagcaccatctgaaataaatagaaagaaacaaatacgacaaagacaaaaacaaaagaaaaaaaaagaaagaaagaaagaaaagaaaaagctgaaaccgaggaaaggccaaaccatttttaacaaattttttagggctactgaagcggcattgttgtctggggtaaatacccaaggtttgtttcctcatgccaaggaaatcaagaacgtggacacaggtggagtgaggttaagagcagagatttaataagcaaaagagagaaaggagaaccgctggatttctggcccaccttggagtgcacagagttttatagacaggcttgaggatttacataaggcccagagtttgcttggaccaggtataacatttacatagcccacgaggaagctggctaccccaccctaaccttttattatgcaaatgcagtctgtacttggctgggccatgttgcctgctccttactcggcacgtggttgacaaggtaaggggaagatggagccgccatgttggacaaggcttccctgcaggtagccttttcctattggcacggcgtcctcacccgtgcaagcttccaacttgcttgtctatgcctgcagcttgattttacaggctgctctttgttagaaaagaaaatgatttggggctgcttttttattaaaaggaaaacattaccaaggacttcctccctctcactatctgcctaaataatgtcttcttaactcctgtatcactatcattgacatctaaagcatcaacctcaaatatctcctcagacactttagcaaaaaaacagtagaattctctatccagacaacttgtcattctcaaataaagatgataggatgactttcagagatagtaaaaggactcaataacaatgttaccagtgtattctttcagaaaaactcattgaaggcacaatttaaccaactaaaatttcaaaagtaccaggcacagtggctcatgcctgtaatcccaacacttttggaggccaaggcaggcagatcacctgaggttgggagttcgagaccagcctgaccaacatggcaaaaccccatctctactaaacatataaaaattagctgggtgtgggtggtgcctcccaggtacttgggaggctgaggcaggagaatcacttgaactcgggaggtggaggttgcagtgagccgagatcacgccattgcactcctgtctgggcaacaagagcgaaactccatctcaaaaaaaaaaaaaaaatcaaaagtaaaaacactgtaagtagcaagttaaaactccatctaaaaccataaatacaagcagtgtaataaatattatatattacatcttataatttttgagacaaatgtgacaggttaaaaaatcataaattaattttaaaatactgaaaaaacatttcaaaagtataactgaattcatgtttcattgagggaactcaccaattataatttcatttttatcatttcaaaattaacaaatataagtttaaaagaatgcttatcagttatgaaagacattatacaactataagcagaacttctagcagacagaatgtcttccaaactaacacatgcatgtgtaaaatttccagaaaatatagtggcatagaaaacaatgaaaatagaagggaagcataagaaacaaaagccatatattaaaatcattgaaattaaaccaaatatacctgttccatcttagaataaaagtcatactaatttactgaaagcaaaatattttaaattggttcaaaacataaattagagaatattatatatacatatatttaagttaaaaacatttaaatagcataaatttcatcaatcgtaatttctgaccacaatgcaacaagacaagaaaactataattaaaaaacatggcaaaatcatagtagtaagaaactaaagtattatttgcctaatgaatacttggacaaagataaagccaaactgcacaattcgctattgattgctagcacttttttgaacagttactatggccaggtactctccccagtattacagaggctacacagtaaacctgagagttagggtgtaagccgaggtcatagcagtgaagagcacaagctctgtagctgaatgaccagggtttgaatctgagtccaccacctgtcagttgccttggacaagttacttgtctctcctagcttcagtttttccttatctgaaacacagggataatagtagtattagcatgataatacaccattaaaagtgagttatgagcaatatatgacttgatacatacatcagaggcattcaaaccaaagcgacaccatcttgaataggggctgggtaaaataaggctgagacctactgggctgcattcccaggaggttaaggcattcttagtcataacatgagataggaggtctgtgcaagacacaggtcacaaagaccttgctgataaaacagcaggtggcaaagaagctggccaaatcccaccaaaaccaaaatggcaaggaaagtcacctctggtcaagctcacttctcattacatgctaattataatccattagcatgctaaaggacagttccaccagctccatgacagtttacagatgccatggcaatgaaaggaagttaccctatatggtataaaaggggaaggaacctgcagttctgggaattgcccagccctttcccagaaaactcatgagtaatccacccctagtttagcatataatcaagaagtaaacataaaaatagccagccagcagccctcagggctgttctgcccatggagtagtagccattcttttattcctttattttcttaataaacttgctttcactttaaggatttgtcttgaattctttcttgtgcaagatccaagaaacctcttttggggtctggatcaggaccccttctggtaacacacatgaagggcttaatagagtgcccgactcatagagagtgcccaataaatagtaaatattattgttattatctcacgttactaactctttaaacctgactatgggcacatagccaaacttaagagatgtgtattttatatcttgtaccgattaaaccctttatcttgtttcgaaggtgtcttagcaataataatataagattttagcatatgcaattgtcttagcaataataatataagattttaggatatgcaattgtctttgaggacataaatttagtttctaattggaggaaattggaaaactgcgagcacaatcagagtaaaaataagtctaccttgctaatgagttttccccagctcatggttagtaatcagtaggtctttgctgactgatgtactaatttacaatctagttagggacatcaggttgacacttgaaaaacatattaactataaaaggaagaaaataaataccatagaagaaacagaatttggctaaaggaatctcagaatggaattcatagtgttcatagaccgaatggaaatttgtacttgaaatgatatttaatgatacctataatatgtaattaaatataaaattatgtaatggaaattatagaagattagatattccaaagggaaggagcttagtgatgcctggaagaatcagaaggctgaatggaggattctttttttaatactgaggatttggataggtaaagattcaaaacaaacaaacaaacaactattaaaacgacaacaaaaaaagagagacatcagtagcagcactgaagtagaaatcaaaaatgcgtagaactgattgaatggttctaattttgggacactgaagacaattccccaaaatatggtgctttggcatgctgagtgctttgaaaattgaaaggccacaaaagtaagcttcagtatcaaactttttccctctgaccttcccctgcctccctgtctctctgattctctttcctgaaacactggaagggacgtagagaaagttcttgtctgactaagaaagcttcttcccaaaagaaatgcaattgtcttaagaccctctccctagggatctcatcaaacaaccgggaaagatcagccacagagaaaagactggcagtaattgccatgcccagacagacttttcatctattctcccaaggccagctctgagggattacctggagggcttgatctgcataagacaagctttgttccagcactgtgccaccctcatttttccatccagcttccaaagagaatcatttacaaaatgatgtcagcctcccaggtccatacatatcttccctacgaagagagtatttaagcctcaaccatctggtccctcttcaagcctcatactttctgtatgacttctgtgcttatgcatgttaaataaatgttgtagttctttttctcttattaatctgccttttatcagttcattttcagtgaaccttcagtgggcaaagaggaaactttccctctgtctctatactaggatgaagtaacaacttcttcaaaaggtgtggaaacaggtgtcttggttgagttgcctacaccagcctgtgacgttggctgatacctttgttcaagatcttccttgagttcaggatagagagaaggcctctttatctatatgtggatgatcagggtcaccagagcaggtgcctttgtacatgctatgatttggataagctaaaaagctctatgagaataaacaagaaccttgcccaaagataagtctagacatttaaaaatatgtctgaggattttgagatgtgcatatatgcaattatgtatgaattttgtgcgtgaatatgtgggtgtgggcatgcatgtgcctgtgttcatgcttttaaatttgcttgtgtgggcccatgtttgtgtgtgtgtgtgtgtgtgtgtgtgtatctagattacaggtatgtacaggagagaggctactgagagaaaatcactatgaagaaaaaagcacccaagtgtgggctcaattcaggacagggcagccatggaatggtggctcccaggacagtgccacattaggattgaagaaggctctcctcagggtctctctagtggcaaacttaaaaataacaattttcccagaaggccaaatgtttagggaacattttcccccagaggactcaggggtaaaacgaatctgaagaccttaattattcaatgtccccaagcctctcttcctaaacgtggaatggggatgagaaggaatcacttacaagagagagaactgtgtgctaaatatcaggagacaagtcgcccaaaattctaggtaatggtagtaaagtaagaataggcaacctaaggtatcaaaggtcaaacgtggtcccccaaacacctgacctgcaaacctaggcagatagcagctctagagaagaagaaatggctggagcagagagtacgtggctcagtatattagaccttatttgccacatagatgacttccaaaaatactcttttgggcaatgcgatctagagttttttgttgatcaaactcatcctcaatacttgatagggatggtggaacccctgcctcctatatctatcgaattagaatctctaggggagagtccaggaagttctatgtttaataagcactccaggtcattcttatcactagggaagcttgggcagcagtcatttaagagacttctagaaaggagcaggggtggaaggtggcaatctgtccacttaacatgcagaggctactgacgcagcagaactgttaaagtgagtgatgctggctggtggaatgtagaggacatttgggtgacagttgtaaacaatttcgagttggcatgctttgcagatgtcagcctgtatctgtggcatgcattaaacagaccacaaatcctgggcaagaggtacagtatgccatcagcaaatgtatcataagtctttttccccaagaattttcctgatgacagtggaggaaacaaatctagatattccactgaatcaatgttgtcattaacagatttacaatttcatcaatggtataggcactttagtcaaatgaaccacgtaggaataagggtattaaatctctgacagcgttagaagttatttatctgttcatctctccaatgaatttatatgtatttttctattgataaaaaaagaaatacctatagtaaaatagacacttttttttggaataacttccagcttccacttaaactactgtcaacttttgaatggcattctaaatataaagtaattacagtgtaaaatgcctgggggttggaataaagtgttcttgcccctaaagacagtgtttttacacagggcagagagaaaaaggctcatggaatctcactggagagaacctctatatcttaccatccttgcattatagaaaatatgtacattgcaagttggaagtatttcattcctctagtattaatttgtatttcctgccttatattggtttggctgaagttcacataaactgcagtgctttggcccaccaagacagaaagtcattcacgtaaacttttctttcttcctggaattcaccccattttcttccttttctccctcccccttcaccttaacccctctctcagcccaactctgcccttccctttaaaaaaaagttgcattagttctttacaagtgagcaagaacagaaccaaatgtttcacatctgctctctgagttcacggattagcatgagaatgagtagccagtgtttcaatgatgcacagtccagtgaatgagaatgggggctcaagcctggtatcagagagctctctggctcctgccagatgtcctaggcccagggcacaaaagcgtgaacccagagttttaacaaatcacctttctctgaggctaatcactcaagaaaaggttttgttgtgggttggagagggtcaggttggtacttctccaatgatctgtagccttgctcaacctctctagccttagcccttcaaggctttctaaagagacctcttatttctttccctcaaatccaggcaatgagggcaaaagctgcatgccagaggatcctgaaggcaccggggcagcgggggctcattaatcaatggtggccgtgttgctggtctgtcactcactctctctctctctgaacaataaagactttagcaagaataaaatagctcaatgggcatgtacaaggtcaggcttagtggcaagatgggtctggcgcaatcatagttggaggaatcctgcacttttcacagagaaggtttatcagctgtggggtggtggttctaaaggtatggtccctggaccagcagcatcagcctcactggggaacttgtcaggaatgtagattctctgccccaccctgacctgctgggtcagaaactctagggtgagctcagcatctattattcacataccttccgggggtttctacccctggaagttcttcttatttcaaactaaagagactctagccaaatgcctcttggttttttggactaattttatacccaggcctcagccatacctcttttaaactctcatccttgtaggatggggtgacattctgatttgtccaagactgggaatatcccaggatgcagggctttcagttctaaaattgagaaagttccgggcaaactgggacaagttggtcaccctaactgagaaacatggccagtttagacccggaacccgtctgcatgcctttctacctcactgtcattgccctcactattctagtggggtcaaggaagatcaagaaagagagatcaaagagacaaacatcagccagagatcattttaataatgcaatcaatgtgaatgtatcaaaagcctcaaaacgaaacaaaaatagatcaaatgaaaacaagtggattttgtataaagaaagtctcctgagccaggcgcggtggcttatgcctgggcagatcatgaggtcgggagattgagaccatcctggccaacatggtgaaatcctgtctctactaaaaaaaaatacaaaaattagctaggcatggtgacatgcacctgtagtcccagctactcgggaggctgaggcaggagaatcacttgaacccgggaggtggaggttgcagtgagtcgagatcgcgccactgcactccagcctgagcaacagaacgagactcagtctcaaaaaaaagaaagaaagaaagaaagaaagtctcttgtgataaattagtgatttctgcctttagagaaaagatccagaaacttcttcctggacttctgatgagagaatagattattttctcacctctctgtaatcttatcagcagaaagtcattagatcatttaattcctcatactaccactgtgcgttctacgtatttcacttttgacacagcactattttgctcaaattgatctcctcagcttcccaaattataaaagtggatccctaggccaaaggagagacttgagcatatatatagcttgaggagttctccaaatttcagaaagtattcaaaaagggaacagttgcctttgaaagtcaggatctattggcaaatgagttctagggtacaggtgaagggaagggttagtctccctctggtttggaggggtgtttatgaaaaaggtatttgaaggtcccagcataactgccctacttggcttagaggttttatattgcaagaagtgatgtgatctggtggcactgcacagttagagaggcagtttttggccccaaagataagcagaaaaggtctgatagtgactgtgaggaatatgctaaattttgcatagtttagaatgcattattaaatgcctgattgaatttgggagtgttttgtttaaaatttatagaataatgagaaagaaaattatggtacagtaaaaaaggcatagattttgaagcttaaaaagtttggttcaaatcttgcccttttacttaatgtatcatcttgggcaagttacttagccccattttaccagaaattgggaataataacatctatttcaaaagagttatttgaggtttaaataaggtaatatatgcggcatacattgcagagtacgcagtacacagtaagtgctccataaatgttaagaagcagtgtgatacagtagaaagggtttgcagtattgcttcaaaacagactcaggttccactcctagctctggctcttttgagtatatggctttagcatttaaccttcatctgtgaaatttaaactgcatttgtctgtgggagaatgctttaaggactaaattagattacatacataaagtgctcagcattctattacatgttttccccctgaccaaaccatgttaaccacatccttctttcaactccctcatggatgcatttgaatttccaccaccctctgccatgtaccattactgtgcacatgctggcttcctcacttctctctagtttgcctttgtgtgtttctaacacagcctctgtatggcaatgaactctgagatgaactgagccttcccataatatctggttattatgatgaccaaaatcaatttaacctcagagactgggatctgggaaaggcaggtctataaacacttaagatgttcacgaaattctctgatcacaaagtctaggcagacgggggtgaggggagcggagtttgggctcaagactctgtttctgagtgaacactcttcccacctccatgcttcgtcctgctgttactcaccccacatctgtgagggctctggatggaggctgctgtcctacgtgtagaatgggatcagtgttgggcttcaccagacctctgatttttgtgtgtgtatgtctgctgttcttcaggcagcagaggaaggaatcctggagttggagtcagccattggagttgcaaggtaggtggaactctaccacttcaagttgcatgaattgggcaagaacaagaatagccaccactgctaccattcaggaagcccaggtggtcctcaccacagccttgtgaggcaggaggaaaagttggatactaagatgtgggatcacactaagatgtgactcagaaagattgaatgaactgctgcgtgtcacttagctggtatgtggcacaattaggactctgagcaaagtctctgtaattccctaatgtccacattcaaaccgttttacccatctgtttccctctctgcaaaatgaaagagttgagttctgtgctttgaactttaaaagatacagttgaaagcaaaccagggtctctggacttaagcctcagttcagggttctgttccctgtgtttatttgattccccacttctagcctggctcactcagagtggtgtaagctgaaacaccataatggtaatggtaattaacatttgctgagcatttactgtgtgccaggtactcttcaaaaatcacagtatcagactgggtgtggtggctcatgtctgtagtctcagctactcaggaggctgaggttagaggatcgtttgagcccaggagtttgaggctgcggtgagctagattgcaccactgcactccagcctgggtgaaagagagagactccatctttaaataaacaacaacaataataataatgataaataataaaagtattgcatcatattgcaacaaccctcatgtgcagatgagaaacagagccacagaagtgctaagttgcctaaggtggcttagtaaatggcagggcctggtgtaagaccatcaaagcaaagcaagctggagcttgcagagcatcggatcttaggaaggcaccaaaataagtgatgaaaggtgaggccaattgtccgagaatttgtttcttagtcagcaaactcagctgctcccaaagggctgcctgcagccagtgtgattctgtaagaggaaaaagggaagggatgggcttaagggctgatctcttagcagcaattgcttaacaaccatatccccttgtgtttgtaaatcatgagtggaagacgatgtttttggaataatcctagcagtgatatttgttgatgagccactggctgcacctcctgtttaggatgattctatgagcatgaagtatctttggcttgctaatgccatttccattccagaatataccaaacagtgtcaggagggagacaaagacaggctcattcctcaagtgtttttgttgcagcatcacaagcagatggcagcatgagccctgctgtagttgggacaaattgaacgtatcaagcaccagctcatcagagactcccttcgtgctgtaaatcagggcataaagcagcttgaggccccggtaaactgaacaagaagcagcccatcactgatctcattgcccacaagcacagggccaagaggaagtggaacaaaaggcaggccctttgcagaatggagccatgaagagcagcccaaaccggcttccagaggccgttggacactaaatcttgaatcgggattcaagtgctatttagcatgggtgaactgggatttgaagcagaattaattgcctccaaattgtatctttccttccagccatccattagttttctttggcagaaggataatgatacttcatgaaatatagctgcagaatctagccttgttcatcgcaaccctagaatgagctcaaaaaagcgaaaactttcaaataatatagtttccccagggtgagaatgaatatacatattaggtcactattagtgtctcttaaaacaaaaatgcatgcgtttgttttcaaatgatgggatttcagaaactttcaaataaaatgctataagagcatgtgttgtgttttaaattgtagtaagaagagtctgattctggtatttgtttttgttgaagttgtacctgcgttgtatcactttcttggtgaatgtcataactctaggacagggaactggggacaatcaaagctgagacagtgccgttacacagtccctatgtaagagacttccagtcgcttcagaaaatcattagagacagttatggataagacatagattcaagtagatgctgagagttacatccatgaagccactgcctcccttagaggaagaattatgccaaaataattttaaatccctttgaggccatttaacgtacagaatgagtagcaggaagatgtcaatgaggtttttaatgcctgactggcagccaaatagaagccagaatgctccaggatcagtgaagtcaatgtgcagtttatggaggagctgaaaagatctaacttgcagtatgcatgtgtgtattagttagctcaggctgccataacaaaatatcatagactgaggggcttaaacaacagaaatttattttttcacagttctggaggttaggaagtccaagatcaaggtgtcagtgtggttggttttcagtgagggctctctggcttgcagatggctgccttcttgctttgtgctcacgtggcctttcaccagggcatgcacacagaaagtgacttctcagacatctcctgtcacaggggcactaatcctatcagacctaattactcattttttttttttttttttgagacagagtctcactctgtcacccaggctggagtgcagtggcatgatctcagctaactgcaacctctaactcccgggctcaagtgatccttccacctcagcctccccagtagctgagaccacaggtgtgtgccaccatgctcagcttattttttaattctgggtagggacagggtttcactatgttgctcaggctggtctcaaactcctgagttcaagtgattcacccgccttggcctcccaaattgttgggattgtaggcataagtcaccatgctcagtctatcagacctcatggaaccttacttaccttcttataggatctatctccaaatacggtcacatttaggggttaaagcttcaacacatgaattttggggcttataattcagtccatagcacaatatatataaaacttagaatgtatatatatgttagaattttaaaaaattcagtgcatattttggctataagcagaaaataatattacctaatttatgctattgcttaagtcagggcccctaagtcaaaagcccacagagggaagagaggtgatgtccatgaatgaagcaatgaatgaaagaaagcaagccagtccaactcaagtgcatcgttgtcgagatgcaaatctattattatcacatagatcgattcttcttctcctctttaagagatcaattctctttttcaaaaaaaaatctagacattctgcttattttttatgtgaaactttagcaaaattttggcttgttaaacatataaatggatgaccccatctgtgttccttatccaccccacaggcttccaatgtgaaacatccagtttaaataaatgcttttgccttaaggaaggatgaagcaagtgcttttacagttactggtacacatggaatttcagttacctgtgtctgaagtaagtgggaacagaatacacaagtgtgagctaacatggattgcctggaaggaatcaaagccctcttcaaaattggtcgtaaccatacaagcccttacgtgaagacaatgttacccaaaaccaatatttttttattactctcccttttccacagctccccttcaagtttatgatgtttttagtttcctgctgattgcctcttggtaattcaacagagagacatagtaagaactgcagaactcttttgtttatatgttgaatcaacagtgaagaaatctaacagctgacactcatgtgggttctctaaaaatagacctggggttttctaggaggatttgaaatgtgggaaaggtctgtgaaccggaaggcaggagtcctggggtcacattgtggccctgtcattaagttggtgtgtgacccgggaagtcccgtctgcttcctttgccgtgatgtgactttggttgggccatgtctaaggcttttccaagttctcatcatcttgcatattgactgttcttgttggtttttagtgagggctctttgtttggatgagcacagaggttgaacttgggtagtaagcaaattcagctttatttttatatatgtctgctgtgtgtgaggcactgagcttgccattgaactaaatgtgtagatgagtaagacacagttattgccctcaaagagcctataatctagcagataaaattgtactgagatactatttttaggtattatctcatattttcacaatttcttctgtattttctcttttttcttcttccggctgaagtaaataactggctctgccttcacagctactaaagaaggatttaatagaatattctagaaaaaatctataaaaacatctttatgatcttggaaaggcagagattccttaaacaggataccaaaaaaagccataaaaaatatactgataaattttgaacttcatgaaaattaagtacttctattcatgaaaatatactattaagagagtaaaggcaagccattgtctggaaacaaaatatctgcaatacaaataaccaactaaggacttatatccataatgcatgagcaactcctacaaataaatagttttaaaaaagaaaaaaattcagttgcacagtgagcaggagatttgaatatgcacttcacaaaagaaagtatccaaaagatatccaaattatatgttttatatacatatataaaaatgtgcccttcatgatcatcagggaaatgcaaattaaagccacattgtgatattatacaccagaatgtataaaattgaaaaaaactgaaaatacaaagtgttgatgagggtgcatggtaattacaactcctataccgtggggatggaagggaaaattggtacaaccactctggaaagatgttcggtaatattttctccagctccgcagatgcctaacctatgattccaaaatgctgcttgtggaattctacttcatcacaaatgaatggctatgtctaccaaatgacatccacagaatggatcatagcaattttgttagccaaaaactggaaataatccaccggataaataacgtatagtttactcaaataatggtaaattgaacagcactaaaaaagaagcaactaatggcagcaaaatgaatgcatctcacattcaaactattgagtgtaaaaaagcgaacagacacaaaagagttcatactgtatcattctatataaataatgttcaagtataagcaaaataatatagggtgataaaagtcagaatagtggctacctttgagagggtttgactgggaggaccaccagccagctctctggtgtgctgtaattgcactataatgaactggatgatgtagccaggggtgtccaatcttttggcttccctgggccacattggaagaagaattaggccacacacaaaatacactaacactatgggaggcctatgtgagcagatcacgaggtcaggagttcaagaacaacctggccagcatggtgaaaccctgtctctaccgaaaaaaaaaaaaaaaatacaaaaattagctgggcatgatggcgcttgcctgtagtcccagctactcggggggctgaggcaggagaattgcttgaactcaggaggtggaagttgcagtgagccaagattgtgccactgcactccagcctgggtgacaaagggagactccgtctcaaaaaaaatacaaaaacaacaatgacaacaaaaaaacacacactaacactaacaataactgatgagcttaaaaacaaaaaggtacatgcataaatcttataatgttttaagaaagtttatgaatttgtgttaggcctcattcaaagccatcctgggctgcatgcagcccagggaccacagtttggatatgcttggcatagttgctaaaaatgtattgagtgatacagttaacatttgtgcgctttatctagccaggctctctagcttttgtttttgaaacacgtatgcagtggtttgtaacacacattgggatttttcaaggacaatttttaaaaattactgtttgttggacaggcgcggtggctcatgcctgtaatcccagcactttgggaggccaaggcagatggatctcgaggtcaggaaatcgaggctatcctggctaacacggtgaaaccccgtctctactaaaaatacaaaaaaattagccaggcgtggtggcgggcgcctgtagtcccagctactcgggaggctgcggcaggagaatggtgtgaacctgggaggcggagcttgcagtgagccgagatcgcaccaccgcactccagcctgggagacagaaaaagactccgtctcaaaaaaaaaaaaaaaaaaaaaaattagtttgttggaacttgttccagatcaagtaaatcagagaaagactggggaagctcacgtttgtgatgcgggagaattactgttgaaatagaatagaatataaaaaggataatacagttatgcgtctcttaatgatggggatgcgttctgagaaatgcgttgttaggtcattgtgtgtaccttatagagtgcatttacacaaacccagatggcacagtctacagcacacctaggttatatagaaaggcctatttttgctcctagactacaaatctgtacagcatgttactgcagtgaatactggaggcaattgtaacacaatggtaagtatttgtgtgtctaaacgtagaaaaggtagcatgaaaatacagtattgtaatctcaccggccccccatcccggaagtagtcattgttgactgaaacatccttaagtagcacgtgactgtatataaaatagaatacacacacatacacgcacacatactttctctctctctctcccccacccccgtccccccctctctctctctcttctcaggtagttctaattcgcagccagcattgaaaaccaatgcctcaggggaatttcgggtagttatgagtgagataaataattcatgcacactggacaattaccttggttaacaacagtagaaaatgtgggccttccatctacaccctgcaataacctaaaaaagggttcccctgggtaggaggagaagagcagtagtggacagctcaggtgagacttcagagaggaagcaggtgggggctgctccaggagtgctttgtgatctgtgagaagtgacccaggctttggacatttacattcttgtgtatttccctcccacaccaaatcagagatgctccatgtgaccaatagggtagggctgccgggacggtgggacttccaagattaatcataaagggcattgcagcttccacccgggctctcttgaaatggctgtctctgtggcaaactagtggctgtgccttgaagatgctcaatagtcctgtggacgaactcagatgcagaggagccaaggcttcctcatccatagcaccccatccacgttctcctctgtactgtgctctgtcagctttccatgggcctcactgtgccccttggcacacctggaggtatgtgcaaagagcaatgatgagtggacccggggctccatgacttacagttatcacaatgcagatcacagagaactgtcagaaagaagaatggtgcaaatcagcttatcaccttctatcattttttactacccatttggcatgatttatgttttggacagctcttaagatgacactcgagagatttggtccagataagtgatgcagaaactgcaaaaaggaaaggatttttcccaaaaagaaccaggatttcaagatcaatctatgaaacctgatcactttatttttaaaatgatcccttatttctaaaaaagaattcacattttctgcatgtgaaaaacctattttcttatgctctgttcagaaaaaatgcacatagaaatatatatataaatattagtatatgttaataatacatgtgctaaaaatagtgcttaatatacttagacttaaggtctttctgaggcaggcatagttttctgaatcattatattaactattgactatccttaaattgtaaattattatttattaaaatgccatctaataacaaatgagctatgaaaatgtaagaagcttttaaagtactactgtacaggcattccatggaaacctcttctccatgatttatgtttacatgatcccattgtctaaaatgtgaacaatgaaagttttttctttaaatctctattgcataaatgaaataactctcacaatattttcattgaattgataatgtcatttgcaggccaaatgcacataatatacaaaatttactgagttacataaaaaagaatgcatttagagttatttaaagcatgttttcatacgtggactatcacttttattgttccaagctgataaacaaattttaagaatttacaagtcgtactttagttattcaaaacacagcacacagagaaatttgtgcaataaatgcttctatggtccctagtgaaatataataaactaaaattttcttagcaaagaacattttaaaagacaacttcagagaagttttattttgtaaaacaggaaggaaaagcagtgaagatagtgagtgtacataacaataaagattgcactgcaggatttattctcatcaatatttgaggcttattccatgcaatggaaataaacttgtctctttaattcattcagattttacctaacggccagaagaaggcaaagaggtaagatatctaggaatcaggcactgaatgtaatcaatgttttaaaagtatttcgtgaaaatatgtgtaacctaagatttactatttacccttttaaatctacaatttagtggcattaagtacactcgtgtacttaaaatcaccaccatccatctcgagaacttttcatcattccaaactgaaaatttatactcctcaaacaataactctccattctctcttctccctagcccctggtgatcttgtttctactttctgtctctatgaaactgactactctaggtaccttgtgtaagtggaatcatatagtatttgtctttttctgattggcttatttcacttaccatgatgtcctcaaggttcacccatgtgtcagaatttccttcttttcttaggttgaataataattccattgtatagatttacctcactttgatatccattcatctgttgatgaacacgtgggttgcttctaccttttggctattgtgaatcatgctgctatggacatcagtgcacaaatatttaatcaatatttaaactcttgttacggcctgtaaacagaacaccatcagattatgtttgtgatcaggttttcctagtgacattaggatatatgggttaataaatcacgtcaatgctggaaaatatgactgagactcagaatagttaagaattctaagacaccagatactttaaggtagaaactaagcctgaagaaagaaatgctgcctgatagagtttggatgtttgtcccctccaagtctgatgttgaaatgtgattcccagtgttggaggtgggtgcctggtgggaagtgattggatcatgggggcaaacccctcatgaatggtttagcaccatcctcatggtgataagtgagctctcactcaattagtttgtgatatctagttgtttaaaagtttgggacctcccccttctccctcccttgctcccactctcaccatgtgacatgctggctccctgtcaccttctgtgatgattggaagcttcctgaggcctcaccagaatcagaggctggcaccatgcttcctgtacaggctgcagaactgcgagccaaaatgaaatatcttttctttataaattactcagcttcaggtatttctttatagcaacatgaaactgacttaatacactgctcaagtttgaatatctatgaagcaacgaggtgctatgccttttgcaaataattacaatctcacccacccatttgcagccaaaacagggtaatagacattatgagaaaggtgtgtgaaatatgtcctaggggcatgtaaaaggatgccttgcctagacttgggctgtgggggtggggacacagagggaagggggtcgtctgggaggggtggcagaagtcagacaatgcctgagttgggcataagagccatatgaaaattggaagggagataagttgctgtaggcagacaaaagatgtgagctaagagggaggtgcgataaaacattggcatcctgggctggacaacattaagatgtagtctgaaactatccttagaagccttgggtttctcattgtcttaggaaatgagaagaagagaaaagaaagagatgccagttttctttcctctccccatagccataactgagaccagcttttccaaaatagttttcaatgacaaagagtcctgtggttcaaataaacatgaaggctgctggtataagtcaatgcatgctaaaggttctaccatctcactatgtatataagtatatgtatatttgtgtgttttatatactctctctttatatgtatattttatttctacatattcatatacttatatctattttatttaacggttaaacctgcagacttctttgcatgggggaagctttctctttctctattctccactaacatttttgctcaactcacaacatttttcccttactactagcttgaaagacactgggcctgagggtacattagtgagtaaaacgaacaaatccctaccctcagggaagggatccctaccttcattttcaaatccctaccctcattttagtggggaacagacattcaaaattaaaatatttagcatgttagtgataagtgctaaagagcaaaaaacaaagtgagaaaggaggctagatgtgttaagtggggttaacattttagaaggggtggttaggaagaccccactgagaaggtaacttttgagtaaagacttgaggaaggaaatcctgcagctatctggggaagtactttccaggtagatgaaacagcaagtgcaaaggccctgaggcagagccatgcctacttttttccaggaatctccaacaggtcaatggctgaggcagaatgagcccactgcagggtagcaggatatgaggtggaaggggcaggttgtataaaatcttctggcttctttttaattcttttaaacatttacccaaataacgcttgcattttaattgttttcattataaacaagtgtcctaactgtgttttcttagattctgtacttgtctatttggcatccattaaccacaggtccaaataatggccaaagttgcctgcatctcttctgcatggtcttgctgcatctcttggcatgctcttgctctgaaatgtgattttgctagtctttatgaaagttcctaagttcaatgttcttcggtcaaatacgttatgtgccatttgataatcagttgggaacctggagcctcctatgtaaccctctgaaaaagttggtttagaacttgtggtcagactcaatgcctaaaagaaacctctaagccttttaagttttatatttacagatattgacattctaagatcctctggcagtccaggtgatacagaaattcatagcaaagacaagtgaaatgaagcatgcatgtgaataagaggaaaagttgagcaaaatggtgagcttggaatagatctttcaggatacacaaaacctcctaaggaaaacctgtacattataaggaatatttaacactctggaacctagcttccagtgaacatagcccaataaatgacccacaatttgaccatttaggttcatacttccttttcttgaggaggatgaacataacagtttccatattatccagtgacccagaatgcctaggaagtgatagatggtgaggttaattatttaacccaagttttagtaatttcgcttttagaagtgtgaagtaaggtaatattcagagaggtgaataaacttttatgtgaaagaaattgatttcactcttatttatgatagcataatttcaaaacaacccaagagaaattatggaaatatctacattgaaagatgaataatatataatgatataagaaaatacccaaaaggcaattttaactgataaaagcaagatataaaatatatgtttgtaaaataaacccaattttaattcaaaatacatggtatttatatatacaaagatacaaggcacacaggagagtaaggaggaaatacagcaatggattaatagtagtaattactggatagaaatttcataaacagtgttcagggtaactagagccactagaaaataaggggaacatctggaaatgagagagtcctagagagaatacccaggattatgtgtataaactccaaacttggtcttaccccttaaccatgtgtatgtagtgtagactccaagaagcccagctaaggctaaaaggactaacatttcagctgctgcttctcacaggggagacagaattttcagcttgaatttagccaagttaattgcccaattgaaaaaaacattgtctgggtgtggtggctcacgcctgtaatcccagcactttgggaggcagaggcgggcagatcacgaggtcaggagatcgagaccagcctggctaacacggtgaaaccctgtctctactaaaaatacaaaaaattagccaggcgtggtggtggcctctgtagtcccagctactcagggggctgaggcaggagaatggcgtgaacccaggtggcagaggttgcagtgagccgagattgtgccactgcactgcactccagcctgggggacagagcaagactccatctcaaaaaaaaaaaaaaaaaaggaaaaaacacaaaaacacgaggaacctattagaagccagagttcctacaacacatcattaacaatgtccagcacacaatccaaaattactgacaatatgaataaacaagaaaatgccacctattctcaaaagaaaagggaatcagcagaaattgactttaagaggactcagatgtcatggctatcagacaataagtttaaagccacaattttacctatgctcaaagacagaaagaaaaatatgcccacaataaatttaaaaaataggaaatctcacaaagtatacaaaaaatcaaatggaaattctagaattgaaaattttaatatccaaattaaaatttactggatagggttaatattagaatggacattcagaagattgaatgaacttaaggataaatcaatagaaattatccaacctgacaaaaagaaagaaaaaaaaattggaagaaaaagtaaaaagtcccttaccatacactcatttcatcatcagcaatatgaattcaattttctaaaggtaactgtgggccaggtgcggtggctcacgcctgtaatcccagcattatgggaggccgaggtgggtggatcacgaggtcaggagttcaagaccagcctgaccaagatggtgaaaccccatctctactaaaaatacaaaaattagctgggcatggtggtgggtgcctgtagtcccagctactcgggaggctgaggcaggagaatcgcttgaactcggaaggcagaggtggcagtgagccgagatcataccactgcactccagcctgggtgacagaccgagactctgattgaaaaaataaaataaaataaaggtaactgtgaagaaaaaactgaaataatacaaaatatattccgttcatctatatgaaatatgtgcacaacatacttgtaattggaatcaaactatcattgagtaatcacattttccacatagtaatttaaaattctgtaagtgcttgatagtaatttatagttgaaataatagtgctatttatttaaaatattcctatttagacagtttccaattctttgctcttaaagcgataagcagtcaacattctcctgcatatatctttgtgcacatgtatttctcttagacatttagaatggaattcttcaaggtgtaaatctttttaacttttctaactgatttataatatatccagaaaagtgctcaaaatataaatggacatctcagtgaaaattcatgtaaatattatccagattcacttttgctgtttgtgtttttataatttttagaaccaacttgttaaagttcagcacaatgtctgttggtattctgatagaaagtacattgaatatataggttaatgagaaagaactgaaatcttaataatattcattttttcaatatatacatacatatagatgtatgtataagaatatatatataagaatatatatttacaaatatatataagaatatatatatacaaatatatataataatatatatataagaatatatatatatccttcagggctttttagttgatttttagacttaaggctgaatcaaaaatatttcacagtgtaaccttttaaattgagatataatttatctgcaaacaaattgcacagactaaagtgtgtaatgtgatgactttacatccaagtgtaactaccaagtaaccaccacccccattaagatacagaacatctctatcaacctgagactttcctttgtttcctttcaagccaccactccctctccaccaccaccaaatgtaaccatgatttatattgctattaccatagcttagttttgccagaagtaggacttcatataagtgaattacacagtacgtatcatttagtgtctggcatttttcactcaacataattactctttagattcattcatgttgctgattgcatcaatagttcattttctcctattgctgggtacttgatgtacatttttctgttgtacatttggctcatttcattttggcaattatgaataatgctgttaatattgttacacaaatctttttgtagatgtagttatttatttattcattacttaaagttatttcctagggtaatagggtcaaagagaaggtataagactaactgtataagaacttgtttagtaaatttcccaagtagttacatcattttatacctcctacaagcaataaatgagagttctgttgcttcttgttctcaccaacacttgctgttgtcaaatatttttatttccgttatttgcatgggaatgtggtgacagcctgccttcctgaagactggataggttgagcagctttttacatgtttatagacatgtgtttattgtacactttctttttatagtgtctaagtctttgttcatttttatttttaaactttttaaattgcaggcattcaggatacagttctttgtgagatatatgtattgataatattttctcgcagtttgtggcttgattgtttaataatttcatggtcctttctgttaagcggaaattttaaatttctacaaaatccaattcagtattttttcccttattgttagtgctttttctttgctggctattaaatatttccttaccccaatgttgtaaatattcctttatattttcttcatgcaggtttatgattcgacctcttattttagctctattgcccatcttgaataaatttttgtgtatcaggtgaagtgagaatcaaggcttactttcttccacgtaactattcagttcctgcacagtatgttgagaaaacttttcccattaagttgccttattggtcttgtcaaacatcaatgaccatgtccgtaggagtttacttctggaagccacattcttttcattgatatatttatctagactcactgaaatatcacactgtcatcacaactatacttttgtatagtagaaatgattttattaaagctaaaattttagacaattcagcaaatatggaagcatgcccaatgagttaaagttggaattccacaacgctttctgataaaactactttgtttttcctgacgttctgtgacgtacttcatattcttccatagagtgtttttaaaaataaaagttgtatatatttaacatgtacagtgtgttttgatgtatatattcatattgaaatgatgactgcattgaaacaaattaacatgtccatctcctcatgtagctatcttttttttccctttttgttttttttttttgctgagagcacttggaatctactctcttcacaaatttccagtatatattatggagttattaagtgtagtcacaccaggtgttagagttctaggcttaaagactcttaagtaccatcaggacaaaattccatgatgatctggtcacctgtttcatttccaatgctttgcacagtgtctacaatataataaaagcttaatattagttgaataaacaattgaaatgaacttggaagaggggtattggctatcctctcctccacattcagtatttccataagtctaggcaactgcactatatctcaatacacaagacttacatgtcaaataatttcatgggttactatcatagtcatagaaattctgaggatgtcacagcagctctctccccaggtcacatcacttttttgactcctggtttctcttgtaaaagcagtttccttccatgtgtcaatgcagttataaccactttgagacttttctttatgttaacttatttgtattttcatgtactttttatattaatttttaatatttatgtatacactactatacaatatactagatatacagtaaatgattatgcattctattttaattatctagatccagaatgtgggtaaaactgagcactataatgagagtttagtaatctggcctctagttttgtgtctgccagtaacttactttctgagggagtcttatctgggcctcagttcactcatttacaaactttgcgaatttgaactggaaccagatgccctgtggcagtctcagaattctctccagaactctgctggctggaggatgcatactaggagaaagacatctcaggatgagattgtgctctattatatgtcacgtttgctttgcactgagaggcctattgttaatactgccaatacctacagcatctcagacacagcgagaagcagcaatcacttccttctgaaggacagagaccacatgtatcaaaatccctgtctctggaccatctggctgctgattgtatgatactaacatccacactcaattaaactgggctccccttaggaaaacaaagatccaaaagaggcaatgtcaaaagaattgatataatccaaatcctgatgctacagagagcagctggttggggaagttgaagaaggaaaagacacaggggtgtacttgtgatgtgggctgtcgatttcacaaatagtgagaagttttctgagatgtgacttaggaagataaaggggcccaaagagttttggggaatttctctgaattctagagaatcttgggtgtgaatgaaacagtgaacatctaagagggaagcaagtacagcccctccttggttctgtagtggtaatgacatggcaagtaggaggtctcagggattgttttgtctgggtagtgcaaaaagatgtaaagcccaggcttgacgcagctccttatccagtaaaaaggggtccagctctcagagtgccttcctgtagaaatcagaacaagtgactctgatctctcacaggaattgcgggccatgtaaattactgaattaagggtttaactctggtagctatttgagttgtatttttaaatttacgtataaatatacatatataaatactcttatatatgaatgtatatatcatataaaatgtgttttagaaaatacaatgagattggcgcaaaagtaattgcagtttttgcattgtttaaatttggcatttgatattagaatacattcttaaataaatgtggttatgttacacattttcatgcatgtcttgtttttttttttttgctaatgacttattacttgctgtttattttatatttattttagactacggaaatgatgttagaccaaaagtaaattggagcttttcaaaatgggtcataaagcagtggagacaactcgcaacataaacaacacatttggcccaggaactgctaatgaacatacagtgcagcggtggtccaagaagttttgcaaaggagacaagagtcttaaagatgaggagcataggccaggtgcggtggctcacacctgtaattccagcactttgggaggctgaggcgggcggatcacgaggtcaggagattgagaccatcgtggctaacacggtgaaaccctgtctctactaaaaatacaaaaaaaaattagccacgcaaggtggtggccgcctgtagtcccagctactcgggaggctgaggcaaaagaatggcgtgaacccaggaggtggagcttgcattgagccgagatcgcgccactgcactccagcctgggcgacaaagcgagactctgtccccccaaaaaaaaaaaatatgaggagcatagtgcctggccatcagaagttgacaacgaccaattgagaacaatcattgaagctgatcctcttacaactacatgataagttgctgaagaactcaacgttgaccattctatggtcatttggcattggaagcaaattggaaaggtgaaaaagctccataaatgggtgccttatgaactgggtgaaaatgtaaaaaatcgtcatttttgaagtgttgtcttctcttattctacgcaacatcaacgaaccatttctcaatcggattgtgacatgtgatgaaaagtggattttatatgacaaccagcaatgaccagctcagtaggtggactgagaggaagctccaaggcacttcccaaagtcaaacttgcaccacaaaaaggtcatggtcactgtttggtgatctgctgccagtctgatccactacagctttctgaatcctggcaaaaccattacatctgagaataatgcttggcaaatcaatgagatgcatggaaaactgcaatgcctgcagccagcattggtcaacaggaaggacccaattcttctccatgacaattcccaactgcatgtcgcacaaccaatgcttcaaaagttgaacgaattgggctatgaagttttgcttcatccgccatattcacatgacctcttgccaaccgattaccacttcttcaagcatctagacaacgttttgcagggaaaatgctttcacaaccagcagaattcagaaaatgctttccaagagttcgtcgagtcctgaaggaaggcttgttatacctacaggaataaacaaacttatttctcattggcaagaatgtgttgactgtaatcgttcctattttgcttaataaagatgtgtctgaaattagctatatggatttaaaattcacagtctgaaaccgcaattacttttgtaccaacctaatatgtatatatttgtgtgtgtgtgtgtgtatatctaaagttatagtcttctctaagtagtaggtaaaaagagtgaaattattttcagttattcttctgttctctagtctttactcactatctcaacctcaacatccatgccattttagactcagcttttgtctttagctccttcacctagagcttgaatatgagttttccgtatcctgagaataaaaccctttgcactgctgggagtagcatctgggcagcacctaaaacgaggatccctataaagaagacctgacctggggagacggttgacagacagaaaacctgagataagggaggcaagacttgcatatggaaaatctctgggagactctggagaagagaggactagatatgcttagacatacattgtttctaaggaaactgtgtatgtcagcataataagcttttgatgataggttaatttggccacttctttattatttatctatttttaacttttaattaaaaagtaaactttaatgtcgaaaatgcaaacttggggaaggcagaaagatcacacacaaggctatcacttcacaattggaaggttgcacagcggccgggcagagatgttcctcacttcccagacggggcggctgggcagagggctcctcacatcccagacaacgcgggggccgggcagaggtgctcctcacatcccagatggtgagggttgggggaccgggcagaggtgctcctcacatcccagacagggcggtggccgggcagaggcgctcctctgccagatggtgggcatctgggcaggggagctcctcacttcccagactgggtggcagccgggcagaggcaatcctcacttcccagacgttgggcagccgggcagaggtgctcctcacttcccagacggggtggccgggcagaggggcacctcacttcccagacggtgtggcggccaggcagaggtcacttctttattaagaggttgaccagaatttggattcatgagcaaatagatgttaaagcagctgtcctactgtagaaaaataaataaataaataaaataatacttgtgtgtgtatatatatatatagagagagagagagagagagagagagagagatggactcttgctctgacgcctaggctgaagtgcagtggtgcaatcttggcttaccacaacctctgtctcccggcttcaagcgattctcctgcctcagccttccgagtagctgggactacaggtgtgcgccaccacacccagctactttttgtatttttagtagagacggggtttcaccatgttggctaggctggtctcgaattcctgacctctggtgatccatccgcctcggactcccaaagtgctgggattacaggcatgagccattgcgcctggctgaaagactatttttaatgatccagaccatctgacctcaggcacagcagctaccttggctgttacacacctttaccaacttggaattaacaatggtggtatgacgtcttgatctcctggaaaaatctaagaattaaaaaccacaggtgctagtgctggttctgaaagttgaagttcatcccttcccctctgtgacagcatttcacgatgtgtaaagatatttttgtgcatgacaatagatattgtttcccaggataatagcttactgaccaaagacagttatagaacaggcttcaagatggctcactacagacatctcatactcaccttctccacaaagaaccaaaatagtgagcagatagtaacacttcaaatagatcgtctgagagagaacactggaattcaacagagaagtgacaggaagccccaaagcagggaaggaaagataaatgaggcagcctgctgggttgagactgactggggacctggagagtctccccattgtgaggaaagagtaaatcagagacccccccagcggtccacattcccaccatagactcctgcaaacatagtcactggagagtctcttgactatagcaggccctgaagctgatatagggagcttcctggagaccacacaacgctccagcaaggaagctcacagtgcgtccctcacagcccagagtcctatgcagttacagcaaggtgccattttaagagctcatccctcaatagactgcaaagaaccaaggcatgggccgccaacagtgactccgttgcccctggcagtggagccaccatgcattttcacatgcccagattcccctgcctgcagcttctgacactctgggttgccgccagcagggctgaagtggcgagtgggagggaggttgctgctgccggggctgaggaacaagcaaagtgagggctgccagcacaaaggccgaaatatgaacaaagtgcacgctcctcacctgcctgcctgcggctgccactgagagcaacactgccctcttcagtagcagctgttgctaccccccagctgaacattctacccagattctggggaccaccctgactctgcctaccacagccagtgcctgcactgccagggaactgaggacaagcccccgtggcccagcttcactccctgctcccagtgccagagcatgtaataaagtggcctggggaccacccaggccagtccaccactgtcggcctggcagcatcaacctccctcccactcgccacttcagccctggtggcagcaacccagagtgtcagaagctgcaggcaggggaatctgggcatgtgagcactcctcccaagtgcctgcagttggacacacccaccctgctactaccaccatggctagaatccatctgcatgtactacctgtgggcctggaaattgacccacctagcccaacacagccactgtgcagtgtgcaccactcaagactcggagagttgtcccaccacttaactgccattacctgggccacatttgctgttcaggagcccaataacttacctacttcctccattataagaatccaagcaagctacctagagactcaagaattggcccacctgacctgctaataccactgcctgcatatgccaccctagatcccaaggacaggcacactcaggccacccttgccaccactgggttctgaagactggcccacctgacatccctgtctcaagcaaaattcactgcagccttcactaacaataaccccttaagccaccaagaaaatcacagacaccattgattttgtttacagaggaactcatacagaaactacgctactgcatgcaccaagaatcaaaaccaaagtgtcctactcgaccaacaccatagatatatcttcaagaaaaatcctctcctatgaaagcaaattcaaaaaaattaaaggaagcaattgtctcaccaaatatgcatatatcaacataaggacataggaaacagagaaaagcaagaaaataaggcatctccaaaggaacacaataattctccagcaacagatcctaattgtaaaaaaattacaaaatcctaaagaaaggatttaaaatattgattttcaagaagttcagtgagatacaagagaatactacacaatacaaattaatcataaaaataatgcagaatatcaatgagaaatttgccagaaagataaagatcatttaaaaaaaaaacagaaattctagaactaaaaaattgaatgaaatataaagtacatttaaaagcttcaacaatacagtggattaagcagagaaaagaatctcagaacttgaagacaggtctttaaaaataacccaattaggcaaaaataaagaaaacagaatttaaaagaatgagcaaacactatgtgatatatgggacaacacaaagccaccaaatattcaaattctctgaataccagaaggtgaagagaaaacaaaagagttcaaaaatgaatttaataaaaaatagatgaagacttcccaagtctagcaagatatttagacatttagatacagaaagctcagagattcccaaacagatacagtgcaaaaaggtattctctatggcacattatagtcaaactgtcaaaagtcaaagggaaaaatttggaaaatagcaatacaaaagcatctagccacttataaaaaaaaacaaaacaaaaccctaacagatgatttctcagcagaaacctaacagaccagaggagaatagcatgatacgttcaaagtgttgacagaaaaatctgtcagccaaggatgactcagtaatattcttcttcataaatgaaagagaaattaagtctatcacagacaaggaaaacctgaagaaattgatcaccaccagatgggccctacaaaaactgcataagagtcttacacccggaagtgaaagaacagtatctacaatcataaaaacacatgacaacataaatacccccggtagagcaaacatatgaaaaaggaaaagaaaagactcaaatattactactactgaaaaccacaatgacgaatattaagagagaaaaaaaggaacaaagtatatacaaaacaaccagaaatgaattaataaaatgaaagaaataagacctcacatatcaatactaaccttaaatgtaaatatattgaaatttcctcttaaagaatatagtatagactgaatgaaaggataaaaaaactcagcaaactaagcccaatgttagcagaaggaaaataataatagagatcacagcagaactaaataaaatagagacttaaaaaaatacaaaggtgaatgaaacaaaaagctgatttttgaaaatataaacaaaattaatcaaccacttgtgagactggccaagaaaagaaagaaagaagacctaaaaaaaaaaatcagaaatgaaaaaggaaacattataactgatacctcagaaatacaaacggtcattaaagactattatgaacaattacacacgaacaaactggagaactgagacaaaatggataaattcctggacacatacaatttaccaacattgagtcaggaagaaatagaaaacctaaacagaccaataataagtaatgagatggaaaccataataaacgtctcccaacaaaaatccaggactgaatagcttcactgctgaatcctaccaaactttcaaaaaataaataacaccagttctcctcaaactattccaaaaaatgaaaaggagagaattctcctttcataagaatgtaactcattcttacaaaaccagtattacattgttaccaaaagcagacaagaatgcaacaacaacaaaaaagaaaactataggataatacccccggtgaacacagatgcaaaaaatcccaacaaaaatactcacaaaccaaattctacagcacatcgaataaataataaaccgtgatcaagtgggatttatcccagggatgaaaagatggttcaacgtatgcaaatcaataaatataaaacatcacatcgacagaataaaggacaaaaaccatgtaacaattcttctcaataaatgcaggaaaagcatttcataaattttaacatcccttgatgataaaaattctcaacaagctaggcatagaaagaacatacctcaacataataaaggccacatatgacaagcccacagctaacatcattctgaataaggaaaagctgaaaaccttttctttaagaactggaacacaagatacccactttcaccactcttattcaacatagcactgcaagtcctcgccagaacaatcaagcaaaagcagaaaataaaaagcatctagttgttttgtgtgtttgtttgttttgttcaaaggggcagattagaggcattgctagcatacctttcccacttggagggacgaaatagcgtgtagcgattcacactgtgaaatttttttcaagaagcaacacaggaactgaacagtaaaactgaaggaattacataccctttgaaggaagcaggaggctgcagcccacactgtgagtcaggtgaaggcttgcaagtccccagattgtgagagaaggagagactgcctctgagacatacacccccactagggaccctgaaagtccaggccataggggaaggccctaaccccacccagcacaggaaccaactttgggagggttgtggaatataaaagtaggagcagcagtgggaagacccttgcatgcattcccagatcccagtgcgagctgggggacagctattccttactgttcttcacaggggttcctgcagaggactgccaaaaagttcaggaagtggtcgcaggttgaaagaagtccccagctgggtatcatgatgatgtaacctcagatggggatgaactcccttggtcagggctggagtgagcgggagagtgaaaagtaggctgcaagtgtaggagtcatgaatggaggagccaggcgtccagctttgcagccgatggggaggggcgtggcctgaaagccgcaatttctgtcttcacagggaaagcttatgactcagggtagtttcaggctgactggaactcagctcgctcacagtagtctggctcccagggactcccacttctaggggaagggagagtgcaccacaccaaggaaacgccctgtgggacaaaataatctggatggcaggccttgaacactggatcattttgctggtgtagtttctttcagcagaggcacagttgcagtgctggacccagcagaaaaagtcttcagctctatcccaatagtcagacagccctgatgcacatgaggggtcttggagaagaaaaaatctttcctcacttgtctaccactgtatgcacagtggtgcttcttccacaagatctcagcatgagtgcaactatagacagcctttctgggatctatcagggtgactgcatccccacaaaaggagcaccctccaggttcaggcttgcatgagagacagagtcacagttcttctctgcttggaacatcaacattcctacagatgaaaaggggtgcctatctgatgtgagtagccagagcactgagacaggagtgtgtctgagaggtggatacctttcctgctgacccagctggggagctgaagtagctccaactctttcccctgataagaccttagtgctacagactgaggcctcctccacccacctctgtcaaggttgcaacttcatttatccacctgctttatctgcaaccagttcctacccaggaatgaatcctaaatcatcaaaccagtaaataaaacattgaggaaaaacaaataaataaaaaaagtgcatgccacgggggggataagataagctttaaaataccttgatcattccaaccccctagaagatagtgaacttgctcatacatttggcacattgctactacagccagcatataagaaagccaccatacaaagactttctgtaatcaaggaactcttatagagtcatcacccctgaaagcaccaataactgaattagactataattaactttaagcattaaagtcttgtccttaaggggaaaaaagcatttaaaaacaaacaagcaaacaaactcaaagaaacacagtcaaatcatatgtacattcaagaatgagaagaagccagaaaactaactctgttaatatgacaaaacaggatgctataacacccacaaaatatcacactagctctccagcaatggacccaaactaagatgaaatcttcaaaataccagataaggaactcagaaggtcaattatcaagctactcaaggagatatcagaggaaggtgaaaccatcatagagaaattaaaaaagcagttcaggatatgaattaaaaaatttctagagagagaaatatcataaagaaaaaccaaatcagaagttctggaaattaaagaaacactgagagaattacaaaatgcaggggaaagttttaatgatagactagaacaagtaaaataaaaatttcagagcttgaagacaaggcttttgaatttaatcaattaggcaaaaataaagaagaaatcaaaagaaatgaacaaagtctccaagaaatgagggattatgtaaaatggccaaacctaagaataatcagtgttcctgagggagaagagaaaacagttaagtccggaaaacttatttgagggaataattgaggaaaacttctctggcctggatagaaatctagatatccaaatccaggacactgcaagacagagtttcgcttttcttgcccaggttggagtgcaatggcacgattttggctcactgtaacctctgcctcccaggtacaagtgatcctcctgggaaattcatagcataaagatcttcagcaagtcatgtagtcattaggttatctaaaggcaatatgaaggaaagaattccttcagcagtaagagaaaggcatcaggtaacccacaaaggaaaactgatcagactaccagcagacttctcagcagaaatcttataagctagagggactggagtctcatcttcaacctccttacacaactgtcagccaataattttgtatcctgcaaaactaagtttcataaatgaaggaaaaataaagtcattttcagacaaatgctgaaggaacttgtcactactaaaccagtattacagcaaatactaagaggagttctaaaccctaaaatgagagcccaatatgcatcaaaatagaacctcttgaaaacttaaaactcatagggtatataaaacaataacaatgcaataaaactatctaggtaagaattaacacgatgaagagaacagttcctcacatctcaatattaatgttgaatgtaaatggcctaaacactccacttaaaagatatagaatggccgaatggataaaaaatcacaatccaagtatctgttgtcttcaagagactcacctaacttggaaagagtcatataaactcaaggtaaaaggatagaaaaaggtagaaaggtattccatataaatggaaaccaaaaaagagcagaaatagctttcttttttttttttttttttttttttttttttgagatggagtttcactcttgttgcccaggctggagtgcaatggtgtgatttcggctcactgtaacctccgcatcccaggtacaagtgattctcctgtctcagcctcccaattagctcggattacaggcatgcgccaccacacccagtgtacaaaaaaaaatacaaatttttttgtatttagtagagacgaagtttcaccatgtgaatcaggctggtcacaaactcctgacctcaggtgattcacccacttcaacctccctgggattaacaggcatgcacaaaaatagctatttttatatcagacaaaacagacttcaaagtaacaacagtaaaaaaaagacaaattagccgggcgtggtggcaggcacctgtagtcccagctacttgggaggctgaggcaggagaatggcgtgaaccccaggggcggagcctgcagtgagccgagatcgtaccactgcactccagcctgggtgacagtgagactccatctcaaaaaaaaaaaaaagacaatgatagtcactatataataacaaatgaattaatttaacaagatattataattctcaatttatatgcaccaaacactggagctcccagattcataaaacaattactactagacctgagaaacaaaatagacagcaaaacaatattagtgaaagacttcagtataccactggcagcactagacaggtcttcaagacagaaagtcaacagagaaacaatagacttaagtgacacacaagaacaaatggacttaacagatatttacagaatattctactcaagatctgaagaacatgcattcttcccatcagtacatgaaacattctccaagatagaccatgtgagtggccacaaaacaagtctcaataaattttaagaaatcaaaatcatatcaagtatcttctcaggccacagtagaataaaactagaagtcaactccaaaaacaatccctaaaattatacaaacaaatggaattaaataatctgctcctgaatgatctctgggttaacaacgaaatcaagatggaaatttaaaaataatttgaattgaatgataataatgacacaagttatcaaaacctctgggatacagcaaaagctaagaggaaagcttatagcactaaatgcctacatcaaaaagttttaaagaacacacattgacaacctaatgtcacacctcaagtaactggagaaacaagaacaaactgaacctagagctagaagaaggaaataaataacaaagaaaagagcagaactaaatgaaattcaaacaaaaaaattaaaagatcaatgaaagaaaaagctggttatttgaaaaaaataaacaaaatcaatagatcattagctagattagccaagaaaagaagagagaagatccaaaaaacctcaattagaaatgaaactggagacattataactgacaccacagaaatacaaaagatcattcgagactactatgaataccttaatgtgcacaagctagaaaacctagaggaaatggataaattcctggaaacatacagccctcctagattaaactaggaagaaatagaaacagactagtaacaagcagcgagattgaatcagtaatttaaaaattgccaacagaaaaaaaaaagcccaggatcagatggattcacagctaaattctactagacattcatagaagaactggtgccaattctactgaaattattccaaaagattgaaaaagaaggaatcctccctaaatcattctatgaagctagtatcactctgataccaaaaccaggaaaagacacaacaaccacaacaaaaatgacagaacaatttccctgatgaacttagatgcaaaaatccttaacaaaatactagctaactgaatccaacagcacatcaaaaagataattcattatgatcaagtgggtttcatcccagaaatgcagggatgatttaacctatgcaagtcaataaatgtgatacatcccataaacagaatttgaaaacaaaaactatattatcatctcaatagatacagaaaaagcattaaagaaaattggtagctttttttgataaaaagtcaaaaaactcagcatagaatggacatatttcaaaataataaaagccaggccaggaacagcagctcacgcctgtaatcccaacatgttgggaggctaaggtgggaggatcgcttgagtccctgagtttgagaccagcctgagcaacgtagcaagaccctgtctttttttaataaataaataaataaaataaaaaaaataaaagccatatatgacaaactcatagtcaacatcatgctgaatggagaaaagttgaaagcattccccttgagaaaagtaacaagacaaggatgcccactttcaccactcctattcaatatagttctggaagtcctagtcagaggaattaggcaagagaaagaaataaagggcatccaaattggaaaagagaaagtcaaactatcaccatctgcagattatataaattgtatacctagaaaattccaaagactccttcaaaatatttttagatttgataaatgaattcagtaaagtctcagattacaaaatcaatgtacacaaatcagtagcactgctatacgccaccagtaaccaagctgagactcacatcaagaacccaatgccttttacaacagctgcaaaaaatattaaatacctaggaatatacttaagcaaggacataaaagatcactacagggagaactacaaaacactgctgaaaaaaaattacacacgacacaaacaaatgaaagtgcatcctatgctgacaaattggaagaatcaatattgcgaaaatgaccacactgctcaaagtaatctgcagattcaatgcaattcctatcaaaataccaagaccatttttaacagaattaggaaaaacagttctaaaattcacagggaaccaaaaaagagcccaaatagctaaagcaatccgaagcaaaaagaacaaatccggaggcatcacattaccagacttcaaatcatactacaaggctatagttaccaaaacagcttggtactggtataaaagcaggcatatagaccaatgtaacagaatagagaacccagaaataaagccaaatatgtacaaccaactgatttttgacaaagtatacaaaaacatatattgggaaatggacatcctatttaatacatggtgctgggaaaactggcaagccacatgtggaagaatgaaactggatccctacttctcaccttatacaaaaatcaactcaagatggatcaaagacttaaatataaggcctgaagctatgaaaattatacaagacaatgttggaaaagctcttctagacatcggccagggcaaggaatgtatgtctaagaccccaaaggcaaacacaacaaaaacaaaaataaataaatgatacctaattaaactgagaaggttctgcacagcaagagaaataatcagaagagtaaacagacaacctacagagtgggagaaaatatttgcaaactatgcgtctgacaaaggactagtaaccagaatcaaggaacccaaacaaatcagcaagaaaaaacaagtaagtctattaaaaagtaggcaaaggacataatagacatttcttaaaataagatacacaaatggccaacaaacttaagaaaaaatgctcaatatcattaattatcagggaaatgcaaattaaaaccacaataagataccatcttactcctgcaagaaaaaccattattaaaaagtcaaaaaaacaatagatgttggtgtggatatggggaaaggggaatgtatgtgacaaatactcacatatcctcaataaatatctaaaatattgtatatcaattaaaaattatagttggaagattccaaatggagataaaggattgtggctaacattgcaagtccagcttctctgcattgagttaaccacaggctgtgctgggtgcaagctctctccttatcccatggtcacaacccccattgtattagcaggctggcttctgtccctttccttggtcctggtccaaagaactccaattttgtagtataaaagaggtttagataactttctactgtctcagcaagactgtcagtgtatacaaacatggaaaactgaaaaccaggttttcaggttactcacaaaattgaacatcctttatgatattttatagggaagaattttcattcttttgagttgatgtttatcactgaaacccaacccactgaatggcatcatttttctggaaaactgtctgccagtaacatccccactaagataaatctattataagtattatttagagttttcttaaatttatttgcggatgtcagacattgagcatttcttgggaaatgatccaaaaaaaaaaaattccactttattggaaaaaaatcccagctccattgctacaaatacggggcgattttgagccagtcacttcatttcttggggactcagttaatacatttgtaaaatgaaagtgttaaactaaaataactgagacttcccagctgtagcattcattgcttctatgttgtcagtatttgttgatgttttaaataatattacttcattcccagaggcttcttgatctgccatacctctctctccagattcctccacagataaatagttccaggtgggattcgtttagatttattattattattttaatagctaccatatatccagtgcttactatgtgcagaatatatgttatctgacataatccatatgtaatgcaagtattagactagtcttgcctttccccatattttgggaaaggggagtttgtgttaaaactgtttcttgctcctccttgcagctgctgctttgggttgcatgtttctctctgttgctcttggctccctcttgaaccatactggctgtgctgcccaccattgcctaaaactctggaactctgacttccccctccaggtgatgctgtttctcctgtgatattagcaggagatgaggaaacgggacaggaaaatttcccttgctcttgtatctctcagttcttccaagcctaccataccagtctctatttacaacagatattatagagatggaactttctatacaatagaggaaagaataacttaaaactgcatgtaaaatatgattttcatcgagccccaaagaaaaggcaataaataaatagaagacagttgggtgaatggatgaataaatgaagtagctcttcatcatagccttcgggaagcagcctagttcagactcctgttctcagtctcccaagcctggcccagttcaaactcctgttctcagtctcccaagtctcccttccttcatgctcagagaggtatattttttaattattgtttcaaatctctgcttgtcttttaaaaatccacatctgcagtttatgaggattgatatcaccttggatttcatcatctttttcttccagggcaaaccataggccacactatcctacagaaacatgttttcctaaaagctaaggcattaagttgagaaatacatcatacgttgtttcagcagagaaattcagttatgagtctccaaaatatattagagaacttcaaggttggttttaatcctttgaatccaatcccattcaaagtctcttctctctcatatgaagtctagatatgtcttttttattcttcgtatgattttcttaactataaggctaaacacttacacatatctcccaacaatagacaatgttttcatagaacatatggtctacatggaaaataagaaacttttttccgtaaatgcagcataacctatatagatttttttttttttttttttttttttttttttttttttttttttttttgagacggagtctcgctcagtcgcccaggctggagtgcagtggcgcgatctcggctcactgcaagctctgcctcccgggttcacgccattctcctgcctcagcctcctgagtagctgggactacaggtgcccgccaccacgcccggctaatttttttgtatttttagtagagacagggtttcaccatgttagccaggatggtctcgatctcctgacctcctgatccgcctgtctcggcctcccaaagtgctgggacaatataggtttttcagtccacaatactttccatgttatatacagcagtgtcagcaatcttttatctttcctttaaacattcccagaagaaatgggtgtgtataaaatcatgctcattttctgcttccttaaaccacaaaaccatctatatcagatagttgccttcaagtaaaaacaaaacaaaaacaaaaaaaaaacaaaagacaaaaaacgagaagaagctttgaaatcaacctcttttttcactttgtgaaattttttcttcaaatttgtggactaaatatcatctccagttatctctacgaacacaagggtagcagtataaagactcattatttccctgtatttggtgcagatttcaaaggattaggggaaagggttggcctagacttccctttaagttgtatttatgataagctttggtgtagcagttactattctagacttagggaagtgaaggtaagagttaaaatgacacaccaaaatcatacatacggtgagtagaattgctgagatgtcaccaaagttagtgagttgtttaagtccattcactacaatatagagttcagattgtttagggacatctttttccttcaagaatgaagtaaattttttgtctctctttccttttctctgatgtctccttttcagctccttcctcctattttatccagtccttgattaatgctgccttactatgataacaatgtttaatacatttgtgttggtctctttctctctgaaattattttttaaatcacattctgtcgaaataatattaggatttaaccatcagacagagaatgattttgagaagaggtagttatatgtcccccaaatgaaatctgccctttctgcttttattgagaaatcataattcacctcactgatttggtttacctcaatatttcaaatgacagaggtgctttgaccaaaagtagggagattcctgcttataaatttgctaattggggtattttttacatacagtataatgctttgattttaagtgtatagttcaacaaattttgacaaatgttcatacccttctaacatcattcaaatcaagacacagaacatttccattgcccctgaagcattccgtgtggcacttccagtcaatatctctcttccagagaaattgttgttccaatttctgtaaccagagattacttttgcctgttctggaacttcatatagtggaatcatatagtatagactcatatttggcttctttcattcaacataatatttctgagattcatccatgtttttgtttattttttgcttacttcaagaatataaaaatattcttccaatattttcattatgaagctttctaatttttagctcttatatttaggtatatgtttcatctgactaatttttgtataggacataataaaagggtgaagattaattttttatagagatatccagtttctctaacgttacgtgctgaaaagactttttcctctactgaattttattaacatctttttaataaatcaataaacttcacaaatatgaatacaattctaagttctctattctgtacaattaatctatttgtctatccttatgccaataactaattgcctaatatattgtagttttacactctgtgttgaaatcaggcaatgtaaatctcctaactgtatatctttaacctgcttctaactttatatctttaaaacttggtcattctaagcactttgcacttccgtatacattttagaattagtttgtcaatttttacaaaaatatctgcttggattttgcttgagattgtttgaatctatagattttgatggggagaaaaataaagattacaagattgaatcttcaaatccatgaatatggtatatatctccatttatttagaactataatttctctatgtatagatgcacatcttttgttaaatttatttatttgtacttggattttaactattaagctattataaatgatgttgtttacttaatttcatttcctatttatttctatttcttgtgtatagaaatacttacacttttcattctagctttttttaagtagatttccctggatttttacattcacaatcatgtcatgtatgaacaaagacagttttacttaatgtaaaatttctacttgttcctgttctttgtgctttcttctgtttttttttttttggttgttttgtttttttggcttacggtactttctgtacaatgtcaaacagaagtgggaaaaacaaagattgttgccttctccttgatgttagggtgttcaatattttgtgttaaagtataatgtgcataacactttatcagattgagaaagtcttctactttcagttttctgaaggatttttttcccctcataaatgggcagtgacttttatcagatgttttttctatatctattacactgagatgattatgtaatttaaactttatattaatatggtgaatatattgattgactttagaatattgagacaactttgcattctagagactaccaccacttggttataatgcattatcctgtttaatcttagtattttttcctctaataattttttagttacatggtttacatttcttaaacagttgctttaaaaattatcatatacactcttaaattatgactatctcaaaaatatttaattacctcacaatttcagatatttatgacaatatatttccaattattaccctctgccttttgaggccttattattttacttctacatattgcataaaatctatgttcttttgggtttttttttaccttacatagtcagtactctttaaggatatttaacaatttatgtgtagaaaacaaaaaataattttcaaaatatttttaaatgcactctattctttcttataaagctgagtttttatctgatgtcactgcttttaaacctatgtaaattattttattatttcttgtaggatagttttgctggagtttaattctttcaacttttgtctgtttgaaaatatctctatgccaccattagtttttgaaggatgtttttagcaaatataacagttaattgttctttcacactttaaaaatattattctattatcttctggcttccattatttttgatgaagggtcaggtaacattcttatcattgtcttcctgtatattcagtttcttttttccccctctctggctacttttaagttcatctttttatctttgtttttctgcagtatgactgtgatgtgtctagaagtaaatgtcatcctaccttggagttttctaagctttttggattggtagccttattttcccatttatacatagctagattctatttgctcattgttaagaacctctctatgttcatgaaagatactattcagtgattttttttcctgtattgtttttctcttgtattagtattagggctatcctgcccccaaaccagaagacaagagttctgttgttgtttttttttaattgtctgaaagagtttgtataatatggaaattatttcttccttcaagaaaaattcacatttatgccatctagacctagtgttccttgtggaaaagattatattttgtttaagtgtatttaaaagacacagggatattcaaattttctattgtgtgtgtgtgtgtgtgtgtgtgtgtgtgtgtgcccaatttaaaaaatctgtgtttgtcaagggatttgtttatttcctccaagtaatcaatattgttggcacaaagttgttaataataccctattgcaatctttttaatagctaaaaaatctgtgagatggcttcttttttattcttgatactggcaaattatgcttttcctctttttctgatggctttttctaggagtttatcaattttattaatatttttacaaacaaatttttagttttgttaatgttttctattatttaccttgtcttttttcattgatttttgctctttattttttatccatgttaatttgttcttgttatgttagttgttttagtaaactgaataattgattcttattatatatatgccttttaaatttgtcatatatgtgtgtatacatatatatgtctttaaacttgtaagtttgctgctaagtactgcttacctccatacacaaattttgatactttgtgttcttcttactgagctcaaaatattctcaaatttctattttgattttttctttaatgatgtgtgtgtgttttaatttagttataaatttatttctgtttttaaaaaattctattgggttttcagaacatattcagtaggattttaattttgaaaatgtgttgagattgtttatagctagaaatattgtctatcttggtgtatgttctaagtacatttgaaaagactctataataaaaatatggggaaacaatttcaaaaatatcaataagaccaagctggttaaaagtgattttcaactattctatatccttgtgctactctttgatctattactgaaagaaaactactaaaacttcttttatgattaggaatttgtttgtcttttctgatatatcactgttggcttcaaatattttgaaactatgttagtcacagcatatacatttatgtttgttatgttgtcatgatgaattgatccttttattattataaaatattccccattatttcctgcattactcattttttagtctgatattaatgcagctacaacagctttttttgtaattagtgtttttagggtatatatttttccatcttttagcttcagtgtatctctgtttaaactgtaccttttgtaaagaccattagattatcattcttttttttaactcaggctgccaattaataatttttaattagacttttcagttaatttatatttgatgtatttgtagatatggttaagtttaattctaccattttgctatttgttttctacttgactcacctattttttgttctgttcttcttttattgccttcttatggttagattaccacatgcatctttaacttaattcagtctatcttaaattggtttatattacttcacaaacattataatttatagtaatgtaattctattttaaatttattgcctgtaattctagcactttgggatactaatgcaggaggattgcttaagcctagaaattcaagaccatcttggataacatggcaagactgtctctacaaaaaccaaaaaatttagccagatggtgtggcacacacctgtgatcccagccattcaggaggctgaggcaggagaatcattgagctcaggaggtcaaagcttctatgagccattattgtgcctcttcattccagcctgataacagagtgagactccatctcaaaaaaaaaaaaattatttttcttccttttacatgggataatttccattgtacaagtttttgaattaattttttgctatgtctaatcttctgataagccaattctataaatgtgttaatcgacatctatttaataaacctttttccttttgtatggtaatagatttacaaataatatgaggataatacagagagttcccatataccccagaagcagtttttcctattattaatattttacattagtgtggtacatttgccataattaatgaaccaatgttaatacattcatattaactaaagtttatatttatttgcattcccttagtttttatccaagttatttttctatttcataattccatgtaggcatccaggagaccatactgtgtttagtgtattgccttatgttccttgtggctctggtagtttatcaagaatttcttcattttttatgtccttgaaggttttgagggatactggttagttattttgtaaatatatcacaatcagacagggttatgagtatctgggaggaaaaccacagaggtaaagtgccacttatcacatcataccaaggctaaatactatcaacatgacttatcaatattgatgtcaaaactggtcatttggttgaagtgatgtttttcagatttctttgctgtgaggctatttttttttcctctttttatactccattctttggaaggatgtcactgtgtacagctctcaatataggaagttatgctccatctctttgaggattatttgaaattctgcataggagatgtgtctattttcctccgtttactttttgttcaatcatgtatctatatcagcataaactcatgaacatttattttataccttgggttataatctaattctaccttatttataatattttgttgcccaggttgttttagttctggccactggaagttatttcatttggcccttttatccatttaacatattcccataattgtgtgtgtttgtttgaaagcacttacttcctttttcagcacttttttacttttactatgagatgctctaggctcatctagtatatttcctgccttaatcctagaatcaccaatttctccaagacttgtttttttttttttttttttttttttttaattggagaatagtactgaaaaccaaaatctgggccaggcacgatggctcatgccagtaatcccaacactttaggaggccgaggtgggcggttcacttgaggtcaggagtttgagagcagcttggccaacacagtgaaacttcatctctactaaaaatataaaaattagctaggcatggtggcacatgcttgtaatcccatttacttgggaggttgaggtgggaggatcacttgagcttgggaggtggaggttgcagtgagctgagatcgtgccactgcactccagcctgggcaacagagtgagactccatctcaaattaaaaaaaaaaaaggaagaaagaaagaaaagaaaaccaaaatctagatgctagatgtgctcattcaattggagtggtattgcatctaggcctagttgataagtcaaggagatatatgtagatgtatactaagccatgtgtgtgaaacatatctataaatatttttatatgtaactatttgtatctatttaaactaagcatgagttttactgatgtctctcattctaatatgttaccctgttgatcattctaatctcctctccttgcttaaatgtaacttcctattcaaacagtgagaaatttgtctcccacaatccatcatccgtccacttaatttttaaattccactatacatgtacagttgatccttgaacaacatgaatttgaactgtgtggatccgcctatatgcagattttcttccatttctgccatccctgaaacagcaagatcagctcctctcttcttcctcttcctcagcctactcaatgtgaagaaaatgagaaggaagatctttatgataaaccacttccacttaatgaatagtaaatatattttatctttcttattatttttctaataacattatcttttctctagtttttttaataatatggtatagaatacgtataacatacaaaacatatgttaattggctgttaatgtcaccagtaagacctccagtcaactttagaccactagtagcagtcaaaagttatatatggatttttgctgcatggtggttgatgcccctaacccctgcattgttcaagggtcaattgtatcgtggtttccaaattgttaacccatactattgttggaaaagcttaatcaaatagagtgcattgcttctgcagagttccttttccctttagtgttacagattctattcatgccaaaagttagtccttattctcccatcccattcagagagattatttcatatatttgtaatacagctttgttttttgtttgtttgtttttttgagaaagagtctcactctgtcacccaggctggagtgcaatggcacaatcttggctcactgcagccttgacctcctagacacaggcaatcctcccacctcagcctcccaagcagttgggactacaggcacatgccaccatacccagctaattttttgtatttttagtagaccatgttgaccagggtggtctcaaactcctggcttcaagtgatccacccacctcagcctcccaaaatgctggaattacaggtgtgagtcactgcgcctcgccattgtaatacaatttttcttcttcttctttttttttaattgaacttcattttattgtactttgcagaaactgcatttttacatattaaaagttggcctagaccgaagcccagaataatttgctctaggttttattctagtatttttatagttttgggtcttaatttaagtatttaatcaatctggaattccaggagctgccggagtatgtaaaaactcttgcagctcagtgcctgcctgaacagctgctgactggagcagctgccatgggtcttcccagttttgtgctagggatccaaggccctggtagtgtaggcacacgagggaatcttctgatccacagattgcaaaaatctgtggggagtgtagaaccctgggcaggtagcacagtgtctcaccactctcttggctgtgggaggaaggtccctttgccctgtgcagttcctagttgaactgtggtctcaccctgcttttttcatttctctcccgataagaaaatatggttacctcagttggaaatgcagaggtcactcaccttttgcatttgtctcagtgggagctgcagaccagcgctgttcctaaatgtccaccttggaccctccccctacctgtaatacagtttcttttgttacattctatacttcattctggaatttccttgacctcctaaatttttaaaaaatttgcataccttaaggttccatgctgtcaggtagtgtgacatgctacctgacttcaaactacactacaaggctacagtaaccacaacagcatggtactggtaccaaagcagatatatagaccaatggaacagaacagagtcctcagaaacaatgcctcacatctacaaccatctgatctttgacaaacctgacaaaaacaagcaatggggaaaggattccctatttaataaatggtgttgggaaaactggctagccatattcagaaaactaaaactggaccccttccttacaccttatacaataattaactcaagatgtattaaagacttaaacataagacttaaaaccataaaaaccctagaagaaaacctaggcaataccattcaggtcatgggcatgggcaaagacttcatgtctaaaacaccaaaagcaatggcaacagaagccaaaattgataaatgggatctaattaaactatagagtctctgcacagcaaaagaaactatcatcagagtgaagaggcaacctacagaatgaaagaaaatttttgcaatctatccatctgacaaaggactaatccagaatctacaaggaacttaaacaaatttacaagaaaaaaatcaaacaactccatcaaaaagtgggcaaaggatatgaacagacacttctcaaaagaagacatttatgtggccaacaaatacatgaaaaaaagctctggtcattagagaaatgcaaatcaaaaccacaatgaaatagcatctcatgccagttagaatgatgatcattaaaaagtcaggaaacaacagatgctggagaggatgtggagaataggaatgcttttacactgttggtgggagtataaattagttcaaccattgtggaagacagtgtggtgattcctcaaggatctagaaccagaaataccatttgacccagcaatcccattactgggtatatacccaaaggattataaatcattctactataaagacatgtgcacatgtatgtttattgcagcactgttcacaatagcaaagacttggaaccaacccaaatgctcatcaataatagactggataaagaaaatgtggcacatatgcaccatggaatactatgcagccataaaaaggatgagttcatgtcctttgcagggacatggatgaagctggaaaccatcattctcagcaaactaagaggaacagaaaaccaaacactgcatgttctcattcgtaagtgggagttgaacaatgagaatacatggacacagggaggggagcatcacatgctggggcctgtccaggggttgggggttaggggagggatagcattaggagaaatatctaatgtcaatgatgggttgatgggtgcaggaaaccaccatggcacatgtgtacctatgtaacaaacctgcacgttctgcacatgtatcccagaacttaaagcataataataataatgattccatgctttgtgctataagttctatgaaatttgatgaatgcatagtttcctgtatctactactgtgatataatatagaatagtttcatcattctaaaataattccagcttcaccaattcaattctttcttctatccccaaacccttggcaaacactgaattttatgactgctacagttttgacttttccagaatgtcatataaatggaattttgctgtatgtatcctcttcagactgacttcactcacttagaaatatgcacttatgattcatccatgtctttgcatagcttgttgatagctcctccttttttattgctaagtaggatcccattgtatggatataccattgattatttacctgttggaggacatcgtagccacttctaaggttttagtggttatgaataaaactgctataaaaatcctatacttttctaggtgaacatacattttcaaaacagttgggcaaatacctaggatcagtaaattatgataatactatatttagctttgtaaaaaactgccaagccattttccaaagtggctgtaccattttgcattctcaccagaaatgaatgagtttccaaatgaagtttcctccaaatgctcaccagcaatggttattgtcatgttttaaaaaaaattagacattttaattaaagtattatatcactgttgttttaatttgtattctcctaatggcaaataatgttgatcatcttttggtaagcttacttgctatctatcttctttggtgaggtgtctcttaaaaaccttttccaattgtaaaatttaattgttttctccgtatcgttgagctttaagagttctttatatattttggatataaatccttcatcagatatgttttgcaacaattttctctcagtctttggcttgtctttcccttctattagcagtgttttttgcagaacagacgattttaattttactaaagtccaactaacaaagattttctttcatgtattatccttttagttttctacctaacctcttcatcaaatgcatgtttatctagatttttaaaaatattttcttctagaagttttagagttttgtactttacatttcagtctatgatccattttgagataacttttgtgaaaggtctgtttttagattcattattttttacacatagatgttcaattactctagttccatttgttaaaaagcgttctttctccattgaattgactttgtgtctttgtcaaagaacagttgtctgtatttgagtctattttgcactctttattctgctctgttgatctgtgtgactattcttttatgctcttttgattattgagctttcttggttactttagcaagcattgacttgagtagtgagattatcccaatttgtccatcttattcagtattgcattggttattccaggtcttctatctttctatattacctttagaataaaatttttggtatctataaaataacgtaatgggattttcattggaactgcacatatttatagatcaaattgagaactgataccttaacaatattgagtcttccagtcaataaacctgaaatatctcttgagttatttttcctttgatttctttcattggtgttttgtagttttctgcattcagatcctgtacatattttgttagatttatacctaagtatttcactgaaggagggggatgatttttttcaatagtattgttttgttttatttgagtttcaaattccagctgttcattgctggtatatgtaggaaagcattgccttttgtaaagttaatccttattattctcagattccatacttttgaatttgtttactcactaacatttatttgtaatttcaaaataaatatttgctatgctttcatggtcattcatgggcatacacagaagaacaaaaaaattgagccacccaatatgcatactccagctgaggctgaacaaggcaatgctgttgtgccttcctgttaggctcccatattgtaaataaatgttctttacgcagtctactgtcacttcttaaaaaaaattttgtgcttttatgttggtgatttcacttccaagtgtagttctgaaatgttttctactgtgcatattctgtgttagatttcattcaagcataagttatactgtagttggctgtgggttcaatgttagtgatttaaaactgtggtacatccagaaaaaaaatgaagagaaaattcacctattttatatggaaggctactctggaaattgctaaagtaacatctatatagtgtttgatgaagttttgaaaaaggtggaaaagcagctacatttctgaatttatgaaatgatgactaatttttaaaaagtgtagtagacagcattgttgtgaggctggaagtcaaataaatttatggtgacattgcccagggtcaggaaagtgccaaaaccttatcagctagtgttttagtacaaagaaatgctgcatataattaactatttataagaattatatattaaattaggtattttaaaacagaaacacacataaaacaaggttgttattggtcagtttatgtaagtattgtcaccagaagtttgtaggaacctaattctgcatttgtcctaagagcaataacactgtattcattaattcaatgttcaaaatgactttatagaaaataactactgtgaataatgagacttgactctattatcaattcacatccttcaatgttgctataatcacttattcattccaggacatatttccatagattctttgagattttcaacctagatgatcatgctatatttttttctttctaatctatatatgttttatttctttttcttgccttatttcactatctaggaattccagcacaatgctgagtagaactaatgagagagaacatccttgcctcactcccaattttattggggaaacatccattaagtgtgataggtttttgtaattgctcttgataaagttgaggaggttcccctctgttactaggttatagagctgttatgaatgggtattaaatttttgtcaaacactttttctgtgcacattgataggattatataatgtgtttcttctaaaactgataatatggtggattgtattgattgatttttgaatactgaatcagcttcacacatctacagtaaagtctacttggccatgatgtacaattcattttatatatagctggatttgactttctaatatttttttgagaatttttgtagttatttttatgagagatattgatctgtagttttccttttttgtaatatctttatttggttttgctattggggtaatgctggcttcatggaattagttaatttcaaaatgtattataaattttttcaacattttttgcagagcaggtgcattttataaaaatgtttggcagaattgaaacatcagcctggtgctttcttctttgaatgattactagttattggttcaaattctttcatagatatagatctactctgtctatctacttctctgtgcctgaattgatagtttatatcactcaagaaattggtacattcaatttatcagatttgtggccataaagtttttcttggcattcctttagtatacttgtgatgtccacggaattaatagtgatgagcccaaccttcatttctgatattgataatttgtgtcttttctttttattttctttgttagtctggcaagaagtttatccatttatggatctttacagagaaccagcttttgggtttgttggttttctattttgaatttcattgattccagtaaaaataatctaatttttattatttctttcttctgctagctttaggtttaacctgctattctttctctactatcctaaagaagaaattgtgattacgaattttaggtcttactagttttctaatacatgcatttgatgctaaaaattttcctgtaagcactgcctttactatattctaattttgataaattgtatttgcaattaaatttttttagtttgtcattttatgcatgagttatttagaactgtgtcatttaatttccacatgttggggacttaactagctattttctgttattaatatctagtttaatttcattgtggtgtaagaacacactgcataattccttttcttttaattttcttaaggtttgttttctggctggaatgtagtctatattagaaaatgttctacatgagctgcaggcaaatgtttatattgctgttgagggctggtgtattctataaatgtcagctagatcaagttgattgatagtactgttcagttcaaccatatttttactcatattgtgcctgttttatctgccaattactgagagaaggttgttgaagtcttcaactctaatagtcatttttctatttctcctttcagttctatcaggctttaattcatttattttgacattctttcacattcaggatctttttttggcaagttgaaccctttattattatgtaatgcctctatatatttctgacaatcttcatttttccaaagtctgctttgtttcaaattaatatagctactccagctttcttttgactcttgttaacatggtatatcttttccatttctttacttttagcttaagttttttatatttaaagtgaatttattgtagataacatatagttaggctttgcttatttccattctgataatcgctgtgtattaagaccattcatatttaaagtaactttaattcacatttaaagtaattattggtatagttggattaaaatctgtcagatttatatctgttttctacttgttgattttgttgcttgtttcttttcttttttttttttttttttgagatggaatctcgctctgtcacccaggctggagtgcagtggtgcgatctcggctcactgcaagctccacctccccatttgatgccattctcctgcctcagcctcccaagtagctgggactacaggcgcccgccaccacaccagctaatttttttgtatttttagtagagacggggtttcaccatgttagccaggatggtcttgatttcctgaccttgtgatccacctgcctcggcctcccaaagtgctgggattacaggagtgagccaccacacccggcctgcttgtttccttttttcccactcttcttctgccttctctagttttaatcaaacattttttgtgattccattttattttctctcttagtatataaattatacttatctttaaagcttttttgtagttggcttagagtatataatacatagttttccagctttatttaagtataattgataaataaaaattgtataaatttaaggcatgtaacatgataatttcatatacatatacattgtgaaaggattaccacaggcattacaatccacatttttaaactaattcaagccctgctttaaataacactaatctgttgtacaaatagtggtgcaatatcatattacagagtttcctattttttttttgtcccattgctttgtcccattgctgtcattcattttacttatctgtattctgctttgctatccaccaacagagaccaagctgagagtcaaatcaagaactcaacctcctttataatagctgcaaaataaaatacttaggagatgagagacctctacaaggaaaactacaaagtgctgctgaaagaaatcatagacaatacaaacaaatggaaacacatcccatgctcatgaatggtagaatcaatattgtgaaaatgacaatactgccaaaagcaatctacaaattcaatgcaattcccatcaaaataccatcatcattcttcacagaactagaaaaaaataatcctaaaactcacatgaaaccaaaaaagaggccacatgggcaaagcaaggctaagcaaaaagaacaaatctggaaaaatcacattacccaacttcaaactgtaccataaagccatagtcaccaaaacagcatggtattgatataatcattcaggagcaggttaatctccatgtatttacatggttttgaaggttccttttggagttgactgccaattttattccaatgtggtctgagagaggacttgatataatttcaattttcttaaatttattgagacttgttttgtggcctatcatatggtctatcttggagaatgttccatgtgctgacgaatagaatgtatacttcgcagttgttgggtacaatgttctgtaaatatctgttcagcccatttgttctaaggtatagtttaaatccattgtttctttgttgactttctgtcttaatgatttgtttagtgctgtcagtagagtattaaattcccccagtattattgtgttgctgtccatctcatttcttaggtctagtagtgattgttttataaatttgggatctccagtattgggtgcatttgtatttaggattgcaatattttcctgttagacaagtctttttatcattatataatgtccctctttgtcttttttaactgtttttgctttaaagtttgttttgtctgatataagaatagctacttctgcttgctcttggtgtccatttgcatgaaatatctttttccacccctttatcttaagtttatgtgagtctttatgtgttaggtgagtctcttgaaaacagcagatacttggttagggaattcttacccattctgccattctgtattttttttaagtggagcacttaggtcatttacattcaacattaatattgagatgtgaggtactattccattcattgtgctatttgttgcctgaatacttttttttccatttgtttttgctttataggtcttgtgaaatttatgccttaaggacactctattgtggtctatttcaaggatttgtttcaagaattagagctcattttagcagttcttgcagtgcttgcttggtagtgggaaatactctcagcctttgtttatctgaaaaagactgtctctttccttcatttacaaatcttagttttgcttgatgcaaaattcttggttgataattgttttgtttaaggaggctaaagatatggccccaatcccttctagcttgtagggtttctgctgagaaatatgctgttaatctgataagttttcctttataggttacctgatgcttttgtttcatggctcttaagattctttcctttgtcttgactttagataacctgatgactatgtgcctaggtgatgatatttttgtgataattttcccaggtgttcattgagcttcttgtgtttggatgtctcgatctctagcataggccagggaagttttcctcaattattccctcaaatatgttttccaaactttcagattcctcttctttcttgggaacaccaattattcttaggtttggttgtttaacataatcctaaacttcttagaaactttgtttatttttcaaattcttttttttttgtctttgttggattgagtaaatttgaaagccttggcttcaatttctgaagttcttacttctacttgtttgattcaattgctgaaactttccagtgtagtttgcatttttctaagtatgttcctcattcccagaagctgtgattattttttatttatgctctctatttcactgaagatttttacctttatatcttctatcttttttttatttcattaaattggactttacctttctctggtggcttctttattagcttaataatcaaccttctgaattcttttcctggcaattcagagacttctccttgatttggatccattgctggtgagctagtgtgatcttctgggggtggtaaagcaacttatttcatcatattaccagaattatttttctggtttcttctcatttgggtagactatatcagagggaagatctgggactcaaggcctgatgttcatattcttttgtctcatggggtactcccttgatgtggtgctctcccccttcccctagggatgtggcttcctgagagccaaactgcagtgactgttatttcttttctggatctagccacccagcagaactactgtgctctgggctggtgctgggggttgtctgcacagagccctgtgatgtgatcagtctttgtgtcagctgtggataccagcaactacactcatggaggtggaggggagtgaaggggactctgtgagggtccttggttatagtattgtttattgtgctaattttgggttggttggcctctagccaggaggtggcgctttcaagagagcatcagctgctgtagtataacaaggatcagggggtgggtggggccatagagtttccaagagattacgttctttgtcttcagctaccagggtaggtagggaaagaccatcaagcatgagcagggttaggtgaatctgagctcggactcttcttggttagggcttgctgagactgctgtgggggatgggggtgtggttctcaggccaaaggagttatgttcctgggggaattatggctgcctctgctgcatcatgcaggttcccagggaagtaggggaaagccagcagtcgcaagtctcaccccacttccacacagcccaaaaggctggtcccaccccatctgtcccccccacccaacaacaccaagtttatttccaggcagtggatgaacagggctgagagcttgccccaggctatcagcctcccagctgagaaagcaagtaaggctttcaggtttcaggcctccccacctgccatggtttctgtgctatgtctgcactcctgattcacccactcctccaggttctgtccaggaaacttcacatttggtcaaaatcgttacaaagttcagctggaagttttcttcttcctgtggtcttttttcagttcctctgacagtgcttcccaaagggctttttctcactttgtgggacaaagtcagaaatggcttccctgaggaccgagagagcccacaggactctttctgctgcttcttctacccctgtatttttcttggctctctaaattagtctcagttccaggtaaggtcaaatccttctccagcgatctggaccttcaggttccccagtgagagtgtgtgttcagggactttcacactttgggcccttgtagtttttcagctgcctcccagagcctgcaggagcaatccgcttccttcagagggtctgtggattctctcagctttcctgaggtggttcttggagcgaaagttcatgatgtgagtctccatatgctgttctgtctgtccaagtgggagctgcaagttagtcctgcctcctatctgccattgtttttccccatgtatcctccttgtattctatttcacttctgcagacaagaagtgtgaagccctcaggaggacgagctacttgaatataaagcttacctgattttcttctcctttttcatatttcatgtttcttcatgattctgccatctttggattgttctacaacactatcaaacagtatatattgacatttggtcagtagtttataattgttgttggtaggatggttgtctcatgaagtggttcacgaagagaggaggtgagatatttaattccaagaaaatctggcatgaactacttggggaataaaccaatatccagaatttgggcctccccttggtagaccccaaaacctgattatatcaggtggatctattaatattaactaatcacaagactaacagataaaattagaaagccattttattaatttcccaagaaaagtaagaattggaccagagtcctcacggctgcatcattggcaactttcttttcctgtaggcaagcctacatgggaagtgaaattacaaccaggagtttgtttgttgagcataaaatcagaaaaaaggcagttgtttggatgcttaatataatcaagctaataaagcctcaggtatagagcttcacagaatgggtagcccagcaatggaaccaggctcctccaagttcacgagctgagctttgtcttcttccaatggcacctgtttatctctgtacctctcctttttatgaacttttgtggttgtcctgtaactttatctaatgacactattcttcggtaagaatattaataatgttaacattattgaagatggttctggcctagatgccattttacccttttcttataactttccataccaatatttgcattggattctgtttttattcattcaaagttcaattctaagaaatatattctacttccataaagttcaaacttttagggatggtttcataacatttttcaagcagggactacagtatctacctctttggctttgaagattaaatgggataacatatgtaatgcttctggcactaacttgataagcattgaaaaaagcctttcgtttccttccccttacttaatgaaaacaggtgttgaaggaaactcatccatttttctcctgtatgttccccatatgataatcgttttcttaagttttggctggccagagaaataagggtgccgaaagcatttttcaatcataactctggatggagattaaaacaaaacaaaatctttaaggcttttaattaccaagacttattcacaagacactggtaatcagaaccttacagtaccttaaatatcagcattggaacatcatatgttctggcttcttttaatcattagaacatctaagccaaagctctctgtgtttatcttgctatgatcttggtggtgaattttaaaagtgagcagtcaactccatcagcagcagatgtaaattatacatatgataactatatatatattatgactcacattttattttatatacactgatatttaccgtaatagttaaatgtctgccatatggaaaacaccaggatgatcactttaaatgtcattccgtgtaatcctcacagttctattcactcaggttggttttcattttccagatgaggaaactggcacagagtaggctctctctataagtgtttgaatgaacacgtggatgagaggggttggaaactttctcaagatcacctacccagcaagtgtcaggccagaatgtagaccactcatttctagttctaaggcctgcattcattgcactgcttcacaatttctcttaacatatttttatcttaaccaaggtttacaaaaatcatggctaaatgaatgattctaatagtgaagatctggggacctggaacagattcagaaagagctatttggaaaggagaaagcttttggtgatgtctgtcaaaaataaaacccacctcctctttgtcctgtttccataccaggaaagatacatttccatgtgaacttgtgtaatttcattgctaacgcaattattatttataccatggaagaaagagtctggaagccttgagtcaatcatagagccgctttggtctttagtttccacatcaatcagagatgagcattagctcagattatctttaaggtctgagagttcagggttccacacttcaatcacatccattcttttctgtgactggctttcccagctatgttctaatggaacagattgacaacagcaaacacagagtcaaatttccatttaaaacacaggtcttgttattttggtaccaattacaaggttatggatcatgcttaaaggtgtttaatatgctgtaatgtttagacacacttggctccaacatttatgagggctgtttgtagcaacaagaagcatgctctcattccataagtatgcaagactgcagtaaaaacagtacagatgggccggaaagaaagaacctcaaactgcctacaaagaagggcaacaagtgttttgggctgcactgtgtttttacctactgccaaatctctcatcagccagagcctgttttataggggcatattttgttgttgcttttttagtttatttcaatccctgatgtagagtatttgtaaaaaattgtgtgaaggattttacggccttgtatgactatattttattcaggagttttatatatatatatgtatttcttaatgagaccacagtttctggagagggttgctgattatctcttcttaccaaaccaaggtaacaggtggtagaaaagtgcctaaggatactcagtgatgcaatggtcaaaggatggaaagtggtctcttgactccaaatattgtagatgtgttggagtcctggaaggattggattccctaggcaacctcagcatatctccacggaaaaacttctatccagatatgcttttaaataccacgaaggaagtgaaatgtatagtccatttaagaaccaaattcctggctgaagaaccaaattagattcacaagtaatgggaatgctaggggaaaagaccagcttgcaaacgaccagccatgtgcatatgcctgtaacagaaagaaagaaagaaagaaagaaagaaagaaagaaagaaagagagagagagagagaggaagaaagaaagaaagaaagagaaagaaagaaagaagaaagaaagaaagaaggaaggaaggaagaaagaaaaagaaagaaagagacaaagagaaagagaaagaaggaaggaagggagggagggaaggagtgggggggaagtgagggaggggggactgagggagcggggagagggagtgaggaaggaaggtagcggggaaggagaagaccctcactggcttggttgcaggtgcttgagctgaaggcatcatgttggtggagaagcatgcaggcatacaaggactactagtttagcataaagggactaaaacatataaaatgtcagagtgtgtgtgtgtgtgtgtgtgtgtgtgtgtgtgtgtgtgtgtgtgtgaaagagagagagagaaacagcatcgttagaggtgacaaagattgaaggaagcagatgaagtcagccttaacgtacaaggttcaatttaactcagttaaaccttttcagcatgcttccaggggtggtgctaggcactggggaggcaatgcaaaacaaggtatgataaagcaaaataagacgtttatcttgagagcaagcaaatgtcagcaaactatggccagtggggccaaatggcttttttaaaatactgccagtgaactaattttttttttttttacatttttaaggggttgtaaaaaaaaatgaaagaaaaataaaacacaaaagttaaaaagtaaaagagcatgcaaaaccatatgtggcttacaaagcttaaaagattttctgtctggacttttacataaaaagtctgcagacttctgctccatagaaaagtcagattattggaagtgaattacaaaaagacaagggctagaatggggtgaatgtgtggtttattaggtccaatagagagatgatttacccagaggcttctcagaggaagtggcaactcacctgggatctaaagaatgagtagaaaatagataaagaaagacgtggacctgaagaaacaatattcaaagcaaatgaaacagcatgggctaggtatagagaattgatgggtgtctcagaaacataaatgaaaaacgaggagttgaaagcagtaaagctagaaactcagatgggtaaactgggatgtcatttcttcttccaggtccaggttttattattccttgaggacttaacccccagctcacaatctgctagcagtcaagacatgtgtcttgtcatgatgtcaagggagagtactgaagccagcaaaatggttgacttagaaaagtgggcctgtagatttaggtaggcacagtgtgtccttcagcctgtgacaggcactggcctcgtcagcttgcagcagtttttctccattcatattagtccactacccagaccacaaggctgccaaatccctgagtcatgtgagtttttttccctctacctcccaaactcaaaacctcattatcctctctttcttcagcttcctcaaggagactgagctgcttctcttttttaaatccctaaaacacaaagatctgataaaaccctcttttctggacaaagatactccctattactttgtttgtcatcagccacatgaggcttagacttaggagatattggtggaaatagtagaaggtgaatatatttggaagacttgcagcaaatttacatgccatagtgactgacttaggctgtcaagaaaatgtatctttattttcaataattcagctggagatgtggctccagtccagtctgccaatttattgtaggcatttcaaaggaaactaagtcacttttgggattacgtgaggtcatttaatgaatgaaccttggtcaatctgggcttcaactaggttaactgagatttctctttcaaggagacaggcttatgttcatcaacactcacctgctggcctccgctttagtaatctttagtcattgctacctattcctgtagcagaaacatccacattctccactccactctgatctgtagctcttgaagtcactccctgaccacaaacactagctctcagccagttccgagctacgcttaggatatacaaaaaatattcagggttctcccgtgtctcgtagaaaagtttcagactcattctgtccaaagacatctgatcattcttgctttcttaaaaaatcgaggtaaaatttatacaacataaaattaacaacctgtttatgcagttcagtgaatttagtgcattcacagtgttatgcagccatcacctcttacatagttccaaggcatttcattacctcaaaaggaaaccctataccgaagaagcagtcactccccatttccttcctctcccagctccttgcaaccagtgatctgtgttccgtctctgtggatttacttattctggacatttcgtataaatggggtaatatatgtaaacttcagtgtctggcttcattcactctgcaagattttagaagtcggtccatgttataccacatgtcagtaatttattcctcttcatggctgaataatattcaattgtatggatattttgttttatatttaggttgtttccactttgggctactgtgaacagtgctgctatggacatgtatgtacagaaatttgagcaagttttccatttttttggctatgtattcaggagcagaattgctgggttatgtggtaattctgttgaacattttattttttttgagacaaagtctcatgctgttgcccaggctggagtgcagtggcatgatcttggctcactgcaacctctgcctcccaggttcaagtcattcttctacctcagcctcctgagttgctgggactacaggtgcccaccaccatacctggctaatgtttgtgtttttagtagcgatggggtttcaccatgttgcccaggttaatcttgaaccccagacctcaaatgatccacctgccttggcttcccagagtgctgggattacaggtgtgagccaacactccccaccttttgtgtttaaattttactgaaccttcatactactttctacagtgactgtaccattttatattccattattgttttttcagacctaaagacacttttctttcaatttgctgcctccttgggctgcaccattgaaactgaagcacgttctattttgtaaattcagccgacccattgtctattgctctcagaacctagagcataaaggaacagcatgtatagcatagagaccaatgagaatttacaatatagtcatgttctttgcatttctattcacattagctggctaaacttcatctctttgataggaaacactagacatgtcattgtggtttttttccttctctatttttatagtacagctgacccttgaacaacaaagggattaggggcactgatccctgccccatgcagttgaaaatctgaatataagttttgaattcccaaatgcttaattactaatagcctatggttgaatggaagccttattgataacacaatcaatgtgcattttgtatgttatatttttatacactgtattcttacaataaagtaagacagagaaaaaatgttattaagaaaattaaaaaggaaaggaaatatgtttactattcattaagtggaagtggattggccaggcactatggctcacgcctgtaatcccagcactttgggaggctgaggcaggcagatcacaaggttaggagatcgagaccatcctggctaacacagtgaaaccccatctctacaaaaaatacaaaaaattagcaggatgtggtggcatgtgcctgtagtcccagctactcaggaggctgaggcaggagaattgcttgaacccaggaggcggaggttgcaatgagctgagactgtgccactccactccagcctgggtgacagagtgagactccatctccaaaaaaaaaaaaaaaagaaaagaaaaagaaaaaaaggaggaagtggattatcataaagattttcatcctcatgatctacatattgagtaggctgagaaggaggaggaagaggaggggttggtcttgctgcctaaggggtggcagaagcagaagaaaatctgcatgtaagtggacccacacagcttaaacccacgttgttcaagggtcagctgtatacacttcatgctatgggtactccattcagggccttattcgtcggtactcaaagtttccctccagaaaagcctggattttggaataaagatcattcactttaaagactgtctcagactttatgatactttatgaatgtcaaaaagatatttcaaaggcaagcacctgattttctattctcaactttgattagccctcctgtcgaagacagaggataccaaaagccaatcttgtgtcctggatagtgaggaaaacagcatggaaaatacttaactaatatcttaaaacattaccttgctactcttggtgaaatagaaactaaagaactttgtgattcgttgattgatatagatgcgagtaggagaagtgaagaatgtgaccaaggtttatagcaatccgtggtaatgactagaaatcagaaaggagtcctggttagtgaaaagcatcaagtttggtatatttagtttaagatataagggtgataaaaaccttaagatactgattgagtggttgaagtgatagattgcagaatataaactgaagggacatgaaaatacaaatggtaaatatttaggaggaagctggaaaattcaaaaaatagatgtgcctgtgagattgagaaacagttgtagacttttactagaagtcatattggaaccaatccttttatgaacaactagaaaagctggacaaaacgagagaaaatgctactggaagttgatagagagatgaaacgagaataaagaatgattgagccaggagtaaagtaggatgagcttgacatttggaatcacttcttacctgagggctttgttgattcccaaggaggcagtggagaggctaaattactgagcagtctttttaacagccttgtgggccttgggggacaaatattagagtgagagttgtaaagctgctaagatggggtgccctggtgaaactctttaatttgtttaggatgccaattggctttatccttagaggagtcattagccagaaataaataagtcttccaaggatgtcaccacaacctgaaatcctctcaattcttgaaattagtgagttaattgactgtgttatcagtaacgcttctagtcaactgtaggctactagtaattaagtctttggttattgaaaaattatattcagattttttactgcattgggcagggatcagtggcccttagcacacacttacaaacagaatacatggttgcaatttcagttccacccattactttggataagttatttcacttttctgctatactgaccatatctgtaacttcagcagagtaacatttttaaaagttgggagatatcagccctagtacttccctcatttgttccttcccactttcaagcaaatatatcattatgtgcttattctcaaagaaggaatatgagagaagcaagtcaataaacaagagtcttctcacagtgttagggtttcgaaacatatatgttcctaaagaaatagaaaatatttttgatgaacatgacatatttagcagaaaacctcatagtcttctctattcttttttccttcagattggaaaatgatgctttggtttgtaagggtaagacatgaaggaaggaaactaggagcccccagttacaagggcagttgggaagtcccaatgaaagttgtccaagcttgaaggaggcagtaaaatatcaaatagatttgtgggatgtgagaacagaggggtagagctatagggaggcatctggatcccagagatgaatgactgcatggtgtacctaagacagccttatggcatataggctaagaaaaagggttctttcccccagcatgtgcctgggtatcagaatgactcctgctcctagccaagtggcacagagacaccagcgaaagccaccagaggtgaaggccaggaacaaggatgtctctagagacctgctgatggagaccagagagttgatcatctgaggacatgccattgtgccagattgcattctttagctcatttaatttttataaaaactcataaaataagtgttgttattattatttctattttatagagagggaaactacagcttagaaaaattaaatgatttatttaaagttatgcagtgatggagacagtatctaaatccaaatctgcctggatgcagagaccatattctgaagcaagggcctgtgccttagacatttgacttttgatcctaaacccactgtataagaatgggttattgcacatcttagcttccttggtacagatggccaaacctctaataatttgcacaatctaagaaacttatcttaagtaactttcttgaaggagaataaaattcatccatttaatccctttagagtgctattatgtaaaactatataatagccttggttttatgctttcctaattaatactgtctctgctaataaatttctactccataaaatcataagtgcaatcttttagcctatacaaatgtaagcatgtaccaaaacctttcaaatacatatcaacattataaacctcccccaaccccaaatggaaggacacatgcattatttaggattagagatgactgtaacatctaaactcaacacaagagtgttttaaacaagacagaaattttgttctccttcacacaaaggcccaggcatggcatggaagctccgtttcacgaagttgtcagctacccgggcgtctttctattccccactcatccactcctcgagtgtggcctcatcatagtccaaaacaccatgtatactccaggcaacagatggatagagcaaaaagacaaaactatgtacttagctcctaaagaaggctctcagaaacttctgttggatacttcaagttttattccatggccagaatttggccacataaacatatctggcatcaaggtaagcggggaaatatactctattctggacagtcgtttgcttctctagaaaatctttttttttttttttttgagacgaagtcttgctctgtcgcccaggctggagtgcagaggcgtgatctcgggtcactggaagctccgcctcccgggttcacgccattctcctgcctcagcctcccgagtagctgggactacaggcacctgccaccacgcccagctaattttttgtatttttagtagagacagggtttcaccgcgttagccaggatggtctcgatctcctgacctcgtgatctgcccgactcggcctcccaaagtgctgggattacaggcgtgagccaccgcgcccagccgcttctctagaaattctattgctgtgggaaagggaggaaaaccaaccctggaaaccagctacaaggctctggcacagaaaaccttgtgtatacactcacttgaccacaaaatcctgtaagcctgattccctgagaaattagggatccatggtctgaatcttgaaaattgatctcataagaattgatcaatccatagttcacctcagtgtccatctttatcatggatattgcttatcaatcatgtattaggaaacaagatagaaggactagactctgttgttgaagaatgaacactatgtatgcatgttttatacataatgtccatatttatgtatatcttttttaaataagtatataatataaatactatatatattatatatttatattgatatctatgtagctatctatatataactttttaagattgttaagtatgtaaaacatgcaaaagtacataaaacacaaatgtatagtttaatgaattatctgatatggtctgaaggtttatgtctcatcttcactcctaaattcacatgttgaaacctaatccccaatgagaggatatttagatgtggtgcttttgggaggtgattaggtcatgaaggcagagccttcgtgaatgggattaatgccctcataaaagaggctccagagaggtccctcatgcctctgcatgaaagattacgttcaaaagacagttgctatgcaccagaaatgagccatcaccagacgtcaaatttgacagctccttgatcttggacttcccagccttcagaactgagaaataaatgtatgttgtttataagccatttagtatatggcattttgttatatcagcccaaaaggactaagattattatcataaagtgaaatccatgttttcagtacaccaccaagatcaagaaatagaacaatgccagcccctaggagctttcacatgtcctctcactcatcagaaacctcctcttccttaaagacatctttaaagataacctcaagactgacttaggataatcataaaaatatatttttagatagaaaacttgggttctaataccattagtgtctctgactagttgtgtgattccgagcaaacaattcaatctcccatgtatgtagttagaaaatttacattatatatatgcatataatataaatttgtgtgtgtgtatatgtgtgtgtgtgcatatatgtgtatgtaatgaaaatctccaagtaaatggtgtgtaagattgtttccaggttttaaagtctactttctatgtgtgagtacataattatattttttgatttgtttgttttaatccttaaatgttcttcctggtaagttttaatatcctgaataataataataatagcataactaggtaaaataactaaaattctgcatcagacatatggtttggttcatttagaaataaagtaataaacctcatttaataatgtcactcttaagtgatgaatttttatgcttaatgctccagaaagaaattgtctgacttctaagtttgtttctggatctgctaccttaattaaatccctggtgtctaagctccattaaagtggccaggcatgaaagatacctggtttgttgcactagataattgaattgtgtcaagagaagaattggctcaatgaagtagtgtcaatgctttttatcacttaccctgaagaaactaactttaattattgtctttacagaataacttggaattttcaacaaatggctttcttcaaacaaggctttatgactttaaaaactagagtcagaatgctacaaataattataaatatggatctatattttacataagagcagtaaaagaaaagagatggggggaaaggtttcaggaagaggaaagaaggcaaagcagtggaaatgaaggcaaagaagggggagtgaagacagagaaaagacccatgagggaaaagaagaggaaggtggaaagagggtttgatatacttagaactagacttattaacgttaaccacctaatacatctcagggcttgcctccagacaatgaatagtggaagaaatgccctcctttttattattgccctatgaattgtcaattagtaatcatcctctgaggagttttttcaaacttccttctttactatggaggtgccacattgttgactctaacttttgcaaacccaattatgtatgcacatcaaaaaaagagaagaagaaactactcttttggtggtaggcgtgattccacccacatttcatccaaaaagtatattctggagagaatgtgaggagagaaatgtggctttgcaattccctcccatgtgagcatgagtgtgaacataatgtttaaaggtacaaaattgtatatatcatggcttttgttgcaaatggagctctgctgaagaaagagcaatctgttccattcacggaggaggaaactggccatgttgggcttaacaagaccccatgctggtcttcatcatggctccttcctatagaattttcaaggacaatttgccttacatttttattttagatcttaatttcttcttaatatatgacatcacttaattgttaaaacagaacctgtatagtctctggaattttgaaactgtttgagaaaagaaacaaaattatagaataataatatttgaaatagatcttaggctgggcacagtggctcacgcctgtaatcccagcactttgggaggcctaggtggaggatcgcttgagctcaggagttcgagaccagcctcggcaacatagggaaaccctgcctctacaaaaaatataaaaattagccagatgtggtggtgcgcacctgtggtcccagctattcaggaagctaggtgggaggattgcttgggcccgggaagtagaggttgcagcgagctgagattgcaccactgcactgtagcctgagcaacaaagtgagatcctgtctcaacaaaaaagagatctcaagggtcagttagtattctctctgcctcatagagcaagccattctataacagctccttcagatggcctgccagcttcctaattacctcctaggcaagtagtatgattgctgcagtatctgaccattggttactgtgccctcttatttgtggggctccctcagttacctgagagtttatgttttcttgccttaaatttttcttttctgattgggcatggtggctcacacctgtaatcccagcattttgggagggctatgtgggaggattgcttgaacccaggagtacaagaccagcctaggcaatatagtgagggcctgtctctacaaaaagtaaaaaaaaatctagctgggcatggtggtgcacacctgtggtcacagctactcaagaggctgaggtgggagaatggcttgagacaggaattcaaggttacagtgagctgtgatcatgccactgcactccagcttaggcaacagagagagacgtgactcaaaaaaaattcttttataatttaaacaaaattagtacattttgctactaataagaggttattatcttcagactgctgtatttccttttcagactctttgggtttaccaaagatcttcttaaagtctggtaactttaatgacaagaattatctgcatatcatgtgaacattggagaatcacatggccccaccatttcctctgatcctgcactttcttttcacatagtgtaaaatgtcattaacgtatttcctacttttaggtcctggcaaccactgatctaattactactcaaatagcttcaccttttccaggataccatctgaatggagtcatacagtattcagtgttttgaatctggattcttccacttatcagaacaaagttgaaattctttgatgttactgcatgtatcagtacttcattcttttttattgtggagtagtatattccattgcatagaggtaccacagcttatgtatccactcatcagtggatggacatttgggttgtttccaatctggggaactacaaataaagccattataaacttttgtatacagtcttttgcatgaaaaaaaaagtttttatttctcttaagtaaatacctaagagcgcaaggactggatcatatggcaaatgtatcttaaagatataagaaattttcagctgggtgcagtgactcacgcctgtaatcccagcactttgggggaccgaggtggtagatcacgaggtcaagatatcgagactatcctggccaacatggtgaaaccctgtctctactaaaaatacaaaaattagctgggcttggtggcacacgcctgtagttccagctacccgggaggctgaggcaggagaatcgcttgaacccgggaagcggaggtttcagtgagctgagatcatgccactgcactccagcccgggcaacagagtgagactccatctcaaaaataaatatatatatattatatatatatatataatatatatatcttagtagaaatccgtctctactaaaaatacaagtatatataatatatataaatatatatattatatatatttatatatttttgtatatattacatatacttgtatttttagtagagacggggtttctattaaaatatatataaaatatatattatttatatatttatatatgtaatatataatatatataatatatattttctatatttatatttatatatttattatatgtatatttatatatttaataaatatataaataaatatatttaatatataataaaatatatattatatataaaatatataataaaatatatattatatataaaatatatataatatctataatatatgtaatatattatatataatatataataaataatatatattatatataatatataataaatatataaataaatatatttatatattatataaaaataatatatatttatatattttatataaatttattatataaatttatataatagtttataaaatatataatataatatattttataaaatattatataaatattttatttataaaatataaatacataatatatatttatattatttatatatatataatatatatatatatatataaaagaaagtttcaaactgttttccaaagtggtcttgcaccagtccagggactcctctttgtctgcatcctcttttcctcaaactaggcagaaattcaagtcaataaccatttatcggaagcctttctggtgtcagtcattgtgcttccctttagggggtcagccttactcaggggtccaaaaactttactctgagctttaatacaaataacatgaagtagtgtttgaaaaaaatacttttgtctctaattcttcagtttttgaatgaaactttctccagagatttatctgttaaattatctttcgtggtacttttccccctttctatttcattgcacccttgaggaggagcattagggatggtggtcaaagctaatggtcctgtgggaccataatcccagagaatgtggttttcactttgatgaagaagcatcttaaaggggcaatcctcatattggttgtgtctttttacttggttactgaaactgtatcttcttttgttatcctttccccccaatgtttggcactgcttggttgcccttttatgacatatctatattgaggtcttagtctttggaaattccactaggctatttttgtaagatggacctagggcatcttcccctgagatacattctctctgtgagaataacaacaataacaacaacaacaatataaatagcaaaaggaattgtcagttatcaggctttatgtgaaatgccctacatacacgtattttatttaacactcacaataattccataaaacaagtgttttgtccacattttatagacaggggaactgagtcctagagaaaggaaacactttcacaaaaccatagagcttccatacggcagaattagaatccatgtccacagctgtctggtgataaggcaaggattgatggcaacattacgactttaacccgtctcctatgctgctttccaagccaaggagaaatcaaggaagtttccttgcacaggaaggcctgaaactgctcagctcactaaagccggtgattattctaagtttgagagataaacttcatccagaatactagttagcttttgctgtataatgtcaaccacagaattctataggactaggattaacaagaggtgagctaagcactttgctgattatggctgggtttgctcttatgtctgagggttgtctaatgagtgatctgatcctgtctggctactactactagggctagtaggtgacttggctttgcttcctgtgtctcttctaccatcaagctagcttgggtgtgttctcatggtgatggcacaggcaggagagaacaagtcccagggaacagcccatttcagaactctgcttgtgccaatatgcccacatcccattgaccaaaacaaaccatatggcacagcttagggtcaaggggcagaatcagtcacccacagaagtggaagggtatggacaaaagagtagggtgcttgcataaggataaacacatagaccaatggaatagaaagtccagaagtaaacctgtacatccatgtccaactgatttttgacaagagtcccaaggccattcaatggagaaagaatagtatcttcaacaaatgttacagagacaactggatatctatatgcgagaaataaggaaattggactcttacctcacaccacacacaaaaattaattcaaagtggatcaaagatttaaatgtaagagctaacctgtaaaagtcttagaacaaaacatagaataaatctttatgagcttgtatttagcaatgcatttttgctatgacaccaaaagtatgaaaacaaaagaaaaaatagataaattggacttcgtcaaaattaaaaatgctgtgtatcaaaagacattatcatgaacatgaaaatgcaaccaacagaatggcagaaagtatttttaaatcttgtatcagacaagagcctggtattccaaatatatacttaaaaaccttctacaatgcaacagctaaaaaaaaaaacaagccaattaaaaatgggcaaaagaggccaggcacagtggctcacgcctgtaatcccagcactttggaaggccgaggcaggtggatcacgaggtcaggagatcgagaccacagtgaaaccccgtctctactaaaaacacacacaaaaaaaactcgccgggcgtggtggcaggcgcctgtagtcccagctactcgggaggctgaggcaggagaatggcttgaacccgggaggcggagcttgcagtgagccgagatcgtgccactgcactccagcctgggcgacagagcaaggctccgtctcaaaaaaaaaaaaaaaaaaaaaaaaatggatgaaatacttgattagacatttttccagagaagatatcctaatggccaacagtagatgcaaagatgtccaacattgttagtcatgagggaaatgcaaatcaaaactacaataagacactaccacacacccactgggatggctatttcagaaagttcaaaataaattttggtgagaacatgaagaaatcaaacccttgtgtattgctggcagaaatataaaaattattatagttattgcaaaaaacagtttggaagtccctcaaaaagttaaacatagatttactatatgacaagcaacttcatccttgactatataccccaaataattgaacaagcgttcaaataaacatttgtagataaatgttcatagcagccctattcacaacagataaaaggtggaaacaactcaaatgcccaccaatgaatagacacacaatggaatattattcagtcatgaaaaggaacgaaatactgatacatactacaatgtggatgaaccttgaaaaaaattatgtaagtgaaagaaaccagacgtaatagtctatattgtgtgattctatttacataaaatatccagataggtaaatcaatagaaaagaaaaagcaaatgagtgattgccaagaactgtttaatgtgtatgggatttttgggaggtgcgatgaaaatgctttgaacaaaatggagacggcgaccacacaacattgtgaatgtgctaattaccactaagttgtaccccttaagattattaattttatgttaggtgaatttcagctcaattagaaaaacaattggaaggtactgcaaagttgcatggcaaatgtgtacagggagaaatgaagaagtgggaccattcatgtaatggatcccaacacagcaatagggaatatgttttcctgatacgccctctgtacaaagattcccctgagaaacaagggagatggctgcaaccattgtagatgacgactaaaggtttgattatgctgaattctgacaaactcttgatctcttccccgcttagagacacaaacaacaactactagtcctacagactaaatggatgaatatataatatcaaattacttttcctctctgggcttcagtgtctataattttataagggcgttgccattgactggatggtttcttccagcccagccactctataacacttgcttctgttagacttacagacaaagtagctccatgtgaatgcactcatttaggagaggaagaggaaaagttgaagacagaaatgcaagtatggaaaagatgtttcactaacttcaccttttgcttcgtaacactttccactgcagatcacctgagaaatctgtgttctccacttctttggaaaagaaaaatatttccctttttctctgtcttcttgtctaagtgcccaaatgtctccttgacccctctttcttcctacacaggatcatcaggaatgggggaccttgaggtgcaccccatgtatattcatgcctgaagacctgattttgtatacatgtggaagacatctgccttgtgggaaacggcggtatctccattcctagtatcactagcattactatcaatggtgtatggtcttttggggattgtgtaagcaatggaaatttgcacagccaaagattccattactgtataaaactaacgactccacaattacggaaaaataaattagtggtggcttccaaagtcctggcatattaagggaggatgcaaacacaggtgtgtcagccaggcatagtagctcacgcctgtaatcccagcactttggaaggctgaggcgggcagatttcttttttttttttttttttttgagacggagtctcgctctgtcgcccaggctggagtgcagtggtgggatctcggctcactgcaagctccgcctcccgggttcacgccattctcctgcctcagcctcccaagtagctgggactacaggcgcccgccactacgccccgctaattttttgtattttttagtagagacggggtttcaccgttttagccgggatggtctcgatctcctgacctcgtgatccgcccgcctcggcctcccaaagtgctgggattacaggcgtgagccaccgcgcccggccgggcagatttctttaggtcaggagttggagaccagactggccaacatggtgaaaccccatctctactaaaagtacaaaacttagccaggcatggtggtgcatgcctgtaatccacctgctcaggaggctgaggcaggagaattgcttgaacctgggaggcggagatggcagtgagctgagatggtgccactgtactccagcctgggtaacagagcaagacttcgtctcaaaaacaacaacagcaacaaatcccaaacacagatgtgttgacccacattttggagagaaaatcaagcatttttctgtctgaaatttgaagtaatattatatctattattgcctatgataatattaatcatccccaacccttactcggcattttataaagtactaagcagttttgcatccattgtctcagttttatcctcaaacaatcctgtgaggaaggtggagcttgtgctatcctcattcaacagagggttaaactgacaatcagaagtttaagtgaatttcataaaattttacaaacaataagagaccaagagcccacacctgtggcctttttctctttcaccacgttaagttccctcaccacactcataggccccttactctcctacctgaggatgcccaacttcaaacaatgctcacctcctggttggctgttgcaagaggctcctaagggtgtcccagccttttttatccaccacatcgtatataactattaagtgatcatcataaaatgcaaatatgatcatgcctctctcctccttaataatcattaatgctccttctgtcctcagaaacactattatctacagaatatagaatggtgtgatctggtgtctaattttccaggctcatctcttacaattcggtagcacaaaatctatccttaaagcccataaagttgattttttttaaatccctgaattagaactgcatgctgcttaatgattctgggtctcttcatatactcttctctcctcgtggatcttctcttctcatctgacacattaatgcctatttatccttcaagcatcaggtcaaatattactgtaaatgaagcttgccctaacttccataggaaaagccaatcactgccttctgtcagttctcctgctttcttgtgcaaaacattgccctgtaataacttaacgtttgattggaattttatattatgaaatccatgctgtcagatgtcaagaattttcatcattattgcctcagtatctatcacagctgtggcatacaggaagtactcaataaatatacgttaaatgtttaaatgaaggattcaaggagaactttataaaaagtacactcctttcatttcttcctgtttgcttatctctattggccagtactcattcttcctaaaagcaacttactatgtggggtcattaacactctgtggtgtttttccatggcagataaggagttgaaggcagtctaagcagggactctgtgaggcagacacaatcccacctgattcctttccctgggtcaggggtcaggagttgcattgcatgtatttcagggtctttgagactaaaaacccgtaagacagctgttgtccacagccacctcagagaaaccctggactggcattgacccaaaacaacccaaatctcaggggcttaggctgaaacaatctgtgatgggaatgtaatactccatatagttttcagttagttctggtttccatttatctttctttcttggcaggtagggcaagggtgagaggaaaatggggtaggtggggagtggaacttgattgaattacctgccaggccttcagaaacccacacaaaagaaactcacaactcaacttggcatctctttaggaaccattccttgaaggctgctgatggagatgctagtgcttaggaaagcattaggctgccctcagataattcgtgtggcaggatcagtgtaagaacatatcgttcttggcaaaggtgaaaagagcctgctgagttggagagacagatcggagactttccccagcctaccctctgcctgttggcattatttacatcctcacttccctcgtcacaggacaactatgccaaggttgtctatccgcagaaggtttgggttcacaattgccatgcaatatttattcctttcctttctttaccattgaacttcttacctcgaccactgagaatttgttaccatcacttctacttcatctgatatttatgagcacagtttctacatcatttagtagctgaggcctttctctaccgcatgaaatatacagatatcacttacaaaagaacatttcatagttatttcaatatggttacggctttaaaataggtcagtctgtttcctctgtcttgtagaacattgtagcatttattatttctaaaattcatctgacatttatttcttgaacagtacattcactgcccattaatttgtattaagcaactgattgagaccaggggtggcactcctcaaacataattgtgtcatctaatgtactgcacagatctacacgtctcagacatcttgctgatgtgaattttttgagtcaagaactgggctaactcagcttcgtatcactgtgtatatctcagtactgagaatatagaagacccacaggttttctaaaaaatttaagcctaatttcccctaaactttcacattgcggataaagatgggatcatagcatcatcagtgattaatccaactaacagtgccaattcttgggctcatctttagaatcaagacctccagtgttcagcactgtaatgtcctctatgttttttctgagagtttccaggaagcgtcacataagatctgaaaaagtgctatttctatgactctgacgggccccgtggtccccaccagaatactgtcgatggtctgtcttctgtcgcctggtgtttcctcactctccttcggtggttccaccaggtaccacagaccctccttgcacccccatgcccaccaagtgccaatgctacccccagtcccaggctgtgtatagtctctgtgggctctgagagaccatgaggcagaggatgctactgcatttaatgaagcagctctttttcccttcaacaaaccgtatgactggagcgccccagaatttgaggttaacatctactacattgttcctggaaataccattttactgtaaagatcatggtttgctattttgtccataagttttctgaaacaggcccagacacatctgaatccccgaatgagtccaacttgaggctcaaatccatagtatattttttcatttcttattataaaagtcatacatatttactgtagaagaatataaaagaaaataacaatcacttgtgatctcacagcccagactaaacattttgacatatattatttaatccctcttgccatttgtttgaaataaactggaggaaatagtattgatcaaaatttctcttgtattcattgagagatttactttgaggctgagaccccaataagatgcttagtagcaaaagttggtttctggaattgctctgaaaagtaatgaaatatggaattagagctcccctggagaaaaaaaaactgagaaggaaagtgcatttggaaactatgatggcatggcagagaaggaactggggcaaaatgaaaagttggatgtaggtttttgagccatacattgtgcacagcagactgcagtctttattaccctgaccttaacatgagacagaaaaccaactgagatatagaatccaacagaatgccactgaaatgcaaataagaattttaaataagccagaaaaaaagaataccaaaaaaactcaaaataaaattgaggaagagatagatcagttgaataattccatctaattataaagcaaccttggttggtgaaggatggtggaagagaggaagggggcaaggagaagactccctaaagtcagaaagaagaatgatgtatcttggatgtgtcttgatcccaagaacatgcttttctctgagcagtagagggctgtgagacccccactacttggagaaaatgaatattcaaaaatgtttaggcaggtcactgtggctcacgcctgtaatcccagcactttgggaggccaaggcgggcagatcacgaggtcaggaaatcgagaccatcctggctaacatggtgaaaccccgtctctactaaaaatacaaaaaaattagcctggcgtggtggcaggtgcctgtagtcccagctgttctggaggctgagctaggagaatggcgtgaacctgggaggcagagcttgcagtgaaccgagatggtgccactgcactgcagcctggccgacagagtgagagtccgtctcaaaaacaaaacgaaacaagaaacaataaggtttaatagtgttgaatgttttggggactaccagatttcacatcctgacttaaattttctgacctgtatgaacctccacccattaagatggtaaccccaactcactatcatgttgtttcttattttatttttaaaaattatttatttattttattttaatttattttatttttattttttgacagtgtctcactctgtctcccaggctggagtgcagtggcatgatctcgggtcactgcaaactccgcctcctgggttcaattaattctcctgcctcagccacccgagtagctgggattacaggtgtgccaacacgttcagctaatttttgtatgtttagtagagacggggtttcgccatgttggtcaggctggtcttgaactcctgaactctggtgatccacccgcctcggcttcccaaagtgctggattatagtcgtgagccactgcacccagcccatgttgtttctttagtgggtatatcttaatatcctagaaaggacagggaaggaataaatcactttcatgatatgagtttaattaaatttaggaataatctgtgaacccgtaatttgtaaagtacttctgatgattaagagcaattggcatgctgactaatatgacagattagtcttgtgatcccaatttaaactttataactgtaatttattttagtcacattgattgaaatacgtaaaaactttgctaactttgtacataatactaaaacatttaagaaaagttaaggttttctacagttatgttgaatttattaggtctactatgttggagaagctttgtttgttagtgacaattagaaaattgagcatgttaaatttataaatgcatttaaaaatatttaatagaatttaactatgttcattgaataatcaaatacttctttcaacatacttatcaaaatttaccagatttttatgaatagaataatacaatttttaaatatctatgatgttcaaagaaaaagctgatatttaagtctgtcactatcacttattaatttattcaaaaaatgttagtgagggtcttcaataactattctgtgtgctggagacagggcagtgaccaaagtacttgctctcaaatgacttacattctcctggaatgacagacataaacaaataaaaagtgtaatctgtagcatggcagaagatgcaaagttcaataaagaaagctaattcaaggcaagggggatggggcttgctggacagataagctggggtaaaggtgtggtctgctgtttttatataaaggggtgagagatggccccactgactgggtggcatttgaagagaaactccaggaattgaggaaaggaattgacagaatttacaggtatccagtggaaaagcttttcaaggcaaggcaccccaaggggacagcaggggctccaggaagggagtcccttcacagaaagccacactgattacatccttagagcacaagcacatggcataccccagagagggcagagccagactacagccttccagtgactcgtcttgtcctggcttcctaaacgcacactctccagagactttgaccctttcaactccctccagcattttttttctgaaaaatctagattgcacttgtgcctttcacccttctaaaaacagattctacattattgtcaccttattattattacatgtgtaagcttacctttcctaaagagttataagaaacttgtaagagaatcacatcttaaggccgggcacgtggctcacgcctgtaatcccagcactctgggaggtcaaggtgggcggatcacctgaagtcaggagtttgagaccagcctggccaacatggtgaaaccccatctcaactaaaaatacaaaaattagccgggcatgacagtgggtgcctgtaatttcagctactcaggagaccgaggtgggagaatcacttgaacccaggaggcggaggttgcagtgacccaagacagtgccattgcactccaacctgtgtgacaaagtaagactccatctcaaaaaaaaaagaaaaaaaaaaaagaatcaggtcttcagtcactaaatgtatgggatgggatagaattagctcttcagcagtaacatttgctataggataatggctgatactgatggaggacatgtgagccccaaaattggagcttagtacaggagggttcttggctttgccaagggaaagaattccagggcaagcaggtggttttagacagcaatctttgattgaattgtaccgttaccagaaaaaggtcccaatccagaccccaagaataggttctcaggtctcatgcaagaaataatttggggtgagtacatagagtaaaatgaaagtaagtttattaagaaagtaaaggaataaagaatggctacaataggcagagcagcagcatggactgctcagctgcttatacttattgttacttcttgattatatgctaaacaaggggtggattattcttaagttttctgggaaaggggtaggcaattcctggaactgagggattttcgcctttttagaccacatacggtaacttccagacattgccatggcatctataaactgtcatggcactgatgggagtgtcttttggcatgctaatgtattataattagcatatgagcagtgagaatgaccagatgtcattttgtcgccatcttggttttggtgggatttggccagcttctttactgcatgctgttttatcagcaaggtgttcatgacctgtatcttgtgctgacatcctatctcatcctgtgactaagaatgccttaacctcctgggaatgcagtccagtaggtctcagccttattttacccagcccctattcaagatggagtcactcttgttcaaacgcctctgacagcactgctccttgtgaagcagttctaactccataggcagtacatctacagtcagcagtccatgggctcttggcaactctataccttcttatacccactttcatttacatgcaaatgaaggggtgtattaatgcaaattgagaggtggattatttcaaacgttctaggaaaagaatggtaacttccaggtcattgccatggtaaagagtggtaacttccggtcattgccatgtcatttgtaaacggtcagggtactggtgggaaagtctaatattaatgagcaatgagggtggctagggatcacttttgtgtctgcctatccgttcccacccatttcttcactttatcctgtttagactagatcctgttttggtcagcaaggttgaccagaaaacaagtcctgctggtctcctacctcaatgctactgcagttgtaccacaagacttggaatttattctaaggcaatcagaaaaatacattcatcattttatccagcaaacactaatacttgctttgagctaaggatgactgtaggctttgaaagttggtttatcaacagcatctttaaaggcgaggtcactttgctatgtaaataaaaactaaacagagctttttaaaattaattatttttaaccgacaaagattatatatattaattatgtacaacatgatgttttgaaacacgtattcattgtggaacggctgcattgatctaattcacacatgcactaattcacatatttttgtggtgagaacactgaaaatctgctcacttagtgattttcaaatatataagtcatcaactatagtcactatgttgtgcaatacatctcttgagcttattcctgttgcctaactgaaattttgtatcctttgaccaatatctccccaaccccctcagttactcaccctcaagccccggtagccaccattctattctctgcttctataagtttgacttccttagattcaacatacaagtgagattatgcagtatttatctctctgtgtctggcttattgcactaaatatgatgccctccatgttcatccatgttatcacaaatgacaagatttccttccttttacaggttgaatagtattccattgtgcatttataccacattttcttcatccagtcattcgttgatggatgcttagcttgattgtataccatggctgctgtgaaaaatgctggaatgaaatttttttaaagaaagattttctgcatgaatgttctttataaaacattcactaaaactcatctttctcaactcctgatgctgttcatttttctcaacattggcagccgtctgcaccaatgaatgtgtttggggaaaggactgtgagttactcttacccttttaggagtcagccgtgtcaggacagctctaaaaactatttgttgctagtaaatattatttcctgaacaacaacaacaacaaaaaatcccttttatatttactgcccactatagtttaatgacctgaacagtagattataagtagtgattccggcagtctctattcttacgcttttgcctcaaactcccaaaccctcattggcaatggagcttgctcaaattgccctgaccatttttctttttaattagagctttcaaagaatgaaataaattgttttctaaagaggataataggagggacaggaaagtaagaaagacacgttgctgcattagaaagtagaacaaatgtcaatgctctctgaccagcatctccatttgctgcatggactataaaatcttttaacagcagcgggaagtgagttcagaatgactaacctttcaccgtgtgtcactaacgagggaggttatagcagattccattcccattaaatgatattatagtgacattccatggtcattaactaaatgtgctaaatgttgttttccaagactgagtttgaaggtacaggagagaaggtatcttctctggagataattaaatgatatccaatgatgtaaacttgcctgccatttgaccaatggatacttgtcaagtaaactgagatcaggaaatgttctctagatgaaaaatatgtccaaagaaccccactctctaatcccccttgtttttaactggcctgggtttttttttttttttctgacttgaattgtagtataaagacttgccattaatttccatgtatatattctggttaaacagatcagagtagcaaataattagtgactcattatatccaaatatgtacattatgccagaatatttttgtaaacaaatgtccccttttacagatttagcatttttaaagttattcttcataatattaatatcaccttttttagatggggagaggtgagattctgtgaagtagaatagctgatgaatctgattacgtgtcttttgtactttttcccaattccaatccaactataaatgactttgcttgagtgtagagttgttagaacaaagtcaaggggctcccagggagtgtttgcagagtgagggcttctgtctttccgtccatgggttggcacagggcttgctatgtataaataaagcagcacaagacagtgacccctctaggccccttaagagtcaggagcctggccgcgtgtggtaactcatgcctgtaatcccagcattttgggaggccgaagttggcagatatttgaggtcaggagttcaagaccagtctgacaaacatggtgaaaccctatctctactgaaaaatacaaaaaattagctgggtgtggtggcaatgcctgtaatctcagctactcaggaggctgaagcaggagaatcacttgaacccagaaggtggaagttgcaagtgagccgagatcgcgccattgcactccagtctgggcgacagagcgagactctgactcaaaaaaataaacaggaaaaaaaaaagagtcaagagactgccagaggggaagaatttaagcatcaattttgctggaaatagcttcacctaagaagatccatatactctattagtgagttgaatggtgctccctccaaaagatatgtcaatgtccaaattcctggaacctgtagatgttaccttacttggaaaaacgtttgtagatatgattaagttaaggatcttgagataagaacatgctggattacccacgtggcccctaaactcgcagacaaggagagacagaagggaagacacagacacacagagcagaaggcaatgtgaagacagcggtagagactggagtgatgaggccacaagtcatggaagccgaggaataccaacagccatgaaaagctggaagagacaaaggaggattttctcctagaatccaaaggatgtatgaccctgctgacaccttcatttcagatatctggcctcttctggagaatgagtttttattttattaagccacccagtttgtgggaattggttattgcagccctggaaaccgatacatatcccaaagcaaagggcagcgcaagagacccgtggccacaaaggagctgcaaagatctgaaacgtcaagcagttaagcttcccccttaaatccaaggccctgcagctaaggaaaccaggggagcaggcaaggttttcctggggcccccgcgaggaccagaaacttacagctggtacattaccagctaaatggagaagagacttaaataccctctactatgctctgggcccccaaactccacctcaaagtacttggggaactgtgccccaagaggaaatacagtgatgtatggatgtcttcagttgagttctctggaaacagactctgagatggacaattgtattctgaagatttactgaagagagctcttgagaaacacatttatgtaaaagaaaggaagccaggaaagggaagagggaaaatctcatcttcaatgtggtttcaactggccacatcctatggaagcccaaacttgggctgacccttcagagttgtcccagattgaggcaagaggatcagatcttccttataccagcgaattcttggctttgggcttcccataattttgatcaaagcaattctttgttgctgcatgtaactccagctgagggatatggctggaagccggcagcagccaaaaggtgcacatgatggccctaaagagaggatctgggtaaagcatgcagcatccggtgaaacagacaacaggaagtgatagcgcaggtaagaaggctcggtagccttagaggggaagagctgccagagctctcaacacagggcactgggatagaataggacagttggggcaggagctggcaactttaacataaacataatgacaaagtcatttaaaatgtacaaaataaaaatagaaagactttgtacggcttaaacctggttttcagattttaaattctgtagatgaattgaaggagagtgcgtgtgacccaaagatcaaatgaaagaaatggcttaaaacatgaagcaaatatggaggaaaaagaatccaaacacagaaatgttgagcaaaaaattaaagtcttggagagtagacctgacaggcctcgtctgaatgccagatgtttttgaaaaagaaatgtatagatagagacaaagcaataactaaacaaataatgtaagaaaagttatctgagcatgaagagcttaatctgcacataaaggcctcattaggctttacatataattagttttaattaaaaaataaaaccatacatccaagacatagccttataatatctctgaattccagataaaagaaataattctcaagcttctagaccaaaagagaaagaatcagagggcattgaagttcttgcttacagcactggaacttggaaattagtataaggacctgtacatgctgaaaaaaaaaaagttgcaattttaaaatgctatacccagacaggcattgttctccagggggaggggatcacttgtagaaatgaaaagatgtatgtcacccacttatattgtttggctgtgcccccacccaaatctcatcttgaattgtagcttccataatccctatgtgtcatgggagagactcagtgggagctaattgaatcatgagttgggtttttcccatgctgttctcgtaatagcgaataaatctcaggagatctgatggttttataaaaaacagttcccctgcacatgctttcttgcctgctgccatgtaagacatgcctttgcttctccttcaccttccaccatgattgtgaggcctccccagccatgtggaactctgagtccattaaacctctttttctttataaattacccagccttgggtatttcttcatagcagtatgaaaatggactaatacagcaaattggtactggtagagcagggtattgctattaagatacctgaaaatgtggaagcaactttggaactgggtaacaggctgtattagtcagggttctctacagggacagaactaatagaatatatatatataatatattaatatacataatatattatatataatatatattctgtagaatatatttatatgggggggttactaagtattaactcacacagtcacaaggtcccacaataggttgtctgcaagctgaggagcaaggaaagccaatctgaatcccaaaactgaagaacttgaagtgcaatatttgagggcaggaagggtccagcacaggagagagatgtaggctggatggctagaccagtctagtcttttcacgtttttctgcctgctttatattctagccatgctggcagctgattagacagtctgcctttcccagcccactgactcaaatgttaaggtcctttggcaacaccctcagaaacacacccagtatcaacactttgcatccttcaatccagtcaagttgacactcactattaatcatcacacaggcagaggtatgaacaatttggagggctcagaaataggcagaaagatataggaaagtttggagcttccttgttgattggttttgataaaagaagtccaggccgcggaggtctcagatggagatgaaggagttattgggaactggagcaaaggtgattcttgttatgctttagcagagcggctggcagcattgtgcccctgccctagagatctgtggaactttgaacttgagagagatgatttacagtatctggcgaaagaaatttctaagcagcaaagcattcaagatatgacttgggtgctgttcaaagcattcagctttattcattcacaaagatatggtttggaattggaactttgtttaaaatggaagcagagcataaaagttccaaaaatttgcagcctgacaatgtgaaaaacccattttctaaggagaaattcaagccagctgaagaaatttgcataagtaacaaggagctaaatgttaatcgccaagacaatggggaaaatctctcgagggcatgtcagaggtcttccctgcagcccctcccatcacaggtatggaggcctagtaggaaaaaatggtttcatgggccgggcccagggccttgctgctttgtgtagccccgagacttggtgccctgcatcccgaccatggctaaaaggggccaaaatactgcttaggctgttgcttcagagggtaaaagccccaagccttggcagcttacatgtgatattaggcctgcaagtcctcaagaattgagatttgggaacctctgcctagattgcaaagggtgtatggaagtgcctgggtgtccaggcagaggtgtgctgcaggggcacagctctcatggagaacctctgctaggccagtgtggaagggaaaatggtgtcagagcccccacacagagtccccactggggcactgtgtagtggaggtgtgagaagaaggccacagtcctccagaccccagaatggtagatccacctacagcttccaccacacacccagagaggccatagacactcaacacaagcctgtaaaagcagctgggagtgggggctgtaccctacaaaaccacaggggcacagctgcccaagaccatgggaatcaacctcttgcatctgcattacctggatctgagacacggagtcaaaggagatcattttgcagctttaagatttgaattccccacaagatttcagactttcataggggctgtagccccttcattttgatcaatttcttccatttggaatgggcatatttactcaatgcctgtacccccattgtatctaggaagtaactaacttgctttgactttacaggctcataggcagaaggggtttgccttgtctcacatgagactttgaactttggacttttgagttaatgctgaaatgagttaagacttcgagggactgttcggaaggcatggttggttttgaaatgtgaggacatgagatttgggaggggccaagggtggaatgatatggtttggctgtgtccccactcaaatctcatattgaagtatagttcccataatccccacatgttgtgggagggacggggtgggaagtgactgaatcatgagggtggatttttcctgtgctgttttcatgatagtgaataagtctcatgaagtctaacggttttataaagggcagttcccctacacatgcactcttgcctgccaccatgtaaaatgtacctttgctcctccttcatgttccaccatgattgtgaggcctcccagctatgtagaatcatgagtctttataaactgtcttttttctttgtaaattaccaagtcttgggtatttcttcatagcagtatgaaaatggaagaatacacccacatactccatctgtggaaaatacctctaaaattattttaaccaaaaaaacaattgaattagaacagggaccgtcagatggggaagatgataagtgacaaaaacctacactagtatacaatgaaatccaaacaggaagtaatagaatgacaggggatttgtaatatgtattaattagggttcttaaactaggcatgctgcaaagggaagcccccaagtcatctgggactgaacatactgaactatgtatttcaaacctagcatttgtggggggccagagttatggtgtggagaaaaaggaagtaaaactattttaaagtttcatgtttccaatgaagcagatatagaaacaatctgggaagtgagtacccaggaggagtaaaagttgatattttgtttttatgtagtactaagatctaatagcaagtgtgttgaatatgggaaggtaacaatcagtggaaaggaaatgtatcataaacttccaatttaacaaggagaaaataaaaaaagaaaggagtgaataatcatttgaccaatgggcaaaaatgaggaaaaaaaactaagagaaagcactgagtgaaaataaccagtcaatgtaaaataaaatgggaagcataatattaagtataagagtcactaactaaaggtaggagagcaaacttcacccataaaaagacagagattgttgaaatgagtcacacacagagagcagcccatgacaaacacactgtgtgaggtctctttcacttgctcttgcaggtctgtctatttctttctccaagctgtgatcggctctgagtagctggcctgtaggggtcccttttctcctggtttccacttaggttcagccagtgaggatcactgagggagagataagaaggagggaggagaacgagcttcttccttatgtgaacagcctggactggctctgttccccagtgaaaatcccttgctcctcccaagataattgactatactcaagtctctgtctttccagattccagtaacctctctctccccttgtccctctggccttaggggtggtaacagctccaattctcctaacaccaggtctgcacactatccttgtgattcccttacaccaacacttcataaagagtttgccatctgttttcctatctggaattatccgattttgagagtgccatctgttttctgttgggacttggctgataattggttccagaagtggccccaggaaagaagttttcaaaatgagattctggaattgggttggatgtatatgcaaggagtgaatgttccgttttacttgttgagtaaacacagaatatgagtaacctgtgatattcagtcattcaaattatcactggtggacagagcaagataaaatatagggagtgtaaggagagggaagggtgctgggagttcatcaggctgtgacactgatttcttgtggcgaaattgaaataataaatattacgaagacacctggcatcttcttaggcctataaagagagtgcatagagaagaagagaaattaaataccatgagcacacaatcgaagacatgcatggaaaatcagaagtctccatgtcagcattaaaggatcctttctgtctcctgtgaccttaggggaggtgaggcccagggtatgagggtgaaggtacagctccaagtagatgctcaaccccaccacacctcttaggctatggtaaagacactagtgaggaaaactgggaacctgagacctgggttgaggacatttgagcagacatagatacacctaagaacttggaatattattcctttgaacctctctttgcaggaagaggatgcctctcttcctccccaatataaaagaactggcttttacctgcataaaagccgttcagtttcttcacatggggcaggccttataacacgatgcctattctctcagcacccacatccaggatgaccaacttgtcccagtttgctcatgactttcttggttttagcactgaaaatcctaggcccaaggaactccctcaattgctgaaagctggaacaatagtcaccctactcatagcaacatctctcatttcttctagccccataaagctagttagagtcctcccagcccagatgtagaggtgaaaggcttgctccagaaaggacagtttactgttcaagaaagcaacaaatttttgctaatgtgaatcagcagaagcctaggggacttgtgtgggagtggatcccaagagtgttaagccaaaaggaaacacaaattgaatttggatcctgcagaatttcctgacatagatgttatcacccagatctggggattttgtgggttgattcacactaaagccccacaatgcaataatagttgctaggttgcctaatcaaaccttgaatgtgatgaagagcttgaaatgccattgcattcctagtatgtggtaggaaggagtctggaggcctggaaaaatgggttatgttagaggagcctattttgtatgacttcctcggtcaccccagcccatcgtacctctaggagggcccgtggacactgtcttcaccattctgattacataagcacagaaaattatttagtaggacacttaataggttattaacatgagttccctggagtgggatggattaaaagaatagaggaagagcagaggttaagcaaaacaaaacaaaacaacaaaaagcatgatatgatcttatgtttgtaaaagtgtatgtggatgtttacaaacataaaagaatgttatttcgaattttcttattctaatttgtatcatttcgctgtttacagagaacatgtgttttgtaattagaaaaaaatgttttactgtgttagtttttttagacagaagagatgagagaagaagatgaggagagcagtgtaagacatcccaaatattattaggtaagttttaagaaaacaaggtttttgtaggtgatgatttggggattgcctgagaggacatgccagggaaatttatggagatgcaggaaggagaagacagcaatagatggagtctaggcatggggagatgataggttgataggacacccacatgagaaatatccaattctaggagaaagggggttgtgtgtataacggataattctggtagactaagaactctgtaatatcctctctttcattgttagaggtgagggcatgaggactgacacataggagagaaatctagaatcctattttagataaatatctgaaccaaaaagaaaagggaaagcaaggaaaggagacccttggagtcagccaaccatgttagtcctgcacgtggtcaaaaaggaaagggatatgcttaaaaagcccgtagaactcttacaaactctgttgaacctctgaaaatgaaacaccagtcatagtgctaggttgaagaatttccatgctgatatatcggggtccggaagattcaaaggttgagagaaaacaagtttggtggaacttgtagcagaagccacagtggttcacctggggacacccacaacacagatatttaaagcaccaacagtttcagtttaaaaagttattgagagagaaggtcctgtgggaacaaacctaaggctgatggcaaagtgcttccaggaggttgttttcacaagctttaaaaattctgaagcaaagactaatgctcacagacacgtagcacggaactcacaggccttgggacctggctgaagatgcagtaaggaaggagaacaggaggtcagaagagtaaaagcagcaactccatgcatgcttcaatttcccaaccgctaactgtgaagaatcctccgcacaagaaaggatgggagatttgtcaacaaaaattgacaaaactaagttcagcactcaggtgctgagaataatattcaaaggaaaatagaaattgggggtccacaaagaccatgatggagcctaaaggaagaaaggacactctaaataagacatgatgacttagaccagcaccatggcagattttgcaagatagaaacgtcttgaatactacctcctccaaaataccaaaatagcagatggaaggtgccggaattacttgatgggagatttctcgacacctaagtttgtcggctttggagtttgtacacccaacgcaagaatctgactggcatcttggaacctgagatttcaattattttcttttcttcttttttttttctttttaacttttctttgtctggactcctttttcaatagatcattcagtctttactagaaccaggtactaagttccagaagcataatttcatggcaggtaattgctagagggcaagggtgattcttgtcaatttccttagacttttatggtggatcaggatctgtgatcccttataactcccattgaccctccaacattatgaatgtaggacgtatgagaatctttggtttattttgctttagattacttaaatttttactcaatttggtggaagatagtaaatgttacaattgctggaaaaggaatcctgacttaatctagacattacaaagaaagcagctgggaataaacagaaaataaaattcagaggacaaaaacttccatttgtttatttctgtgagatttaatttgaaactttaatttctccttaaagagtgggaaggtggtcatatttagtcatatttgaggcttttgttttgctttcttttgctctgttgttcaatattttggtcactgaattatttggatagctttggtattctttggtacccatttcataactcctttaggggattcaggtgaattatattggacaacatgacaaagaataacagattcactgaacacaaaataatcacctttatggttgatactatttgttttaatttattatcagttagcttcactttcagggttggctcatgtgttatccatatgttgcatttttcctactatgttacattctctttatggcaagaatatgttttttgtgtgtgtggttttgtaaccctaaaaggtatcacagtgccatccactaaactgtggtcagtaggcaaaatgaagtgcctggagtgcctaggacaaggcttggcacgtggagagtgtttcaacccagtagactggacgagtcttctgttgatgatgatgagcccaagcagcagtgatgatgacagtggctggtgacagacacagctgggaaaataaaattcagctggaaaaacagtccaatgagtactcagctagagacacagacatactgtttgcttatggttgaacgatatttccagcgtctgagcaggaaccttacctcccactctttgtatgccttctctttccatcatttgttacacacaggagtcaccggcttcagacttacctgccatgcttaattcccttaaacgctaggatgaggctccagcagcttgctctacccatcggcaaacagagacttgtggggagaggggaggagagggaattttggcagaatttcacttaaaaatgtgcagagagctttataatatttttcttggccctgccactcagtagttacctttaaatttactttatgtgaaaccagagaaaccttacactgaataaccatttcaggtgaagttcaagctcacaattttgtcttacctggtcggtctgtccacgaaccctcccctaaactattggtcaaactaccacatgtgtttctgaccctttgaagcctctttttctttttcctccatgtacatacctaatatatatgatagatatcacgtatatctgcaaatataagatgattatccaatgtcccaatgagaatattgaagaaaataaaatgttggtcaattaaaatgttagtgatataggtgaaaaaataaaatccctatgcccaataattaattaggtaatatgatatttaaaaatacatactatataaaataatcttttaatttgaaaatttattctttcaaatttatgtttagcgagaaatgtttttcagatttttcccacgcatcaatgtcttcctcatcattaaatcacttctcttgagtcatcaaacgtggtttcccagaaaacagcatttctgcttcttttttgagataaagtacccttttaagctgtgtctaatgatgacacttacatttttgccccaggccacaagttcccattttcatagcataaggactgttttttgtttattttcccattcacccttgaggggtttatgtgtggtctctgaaatatattcacttactatttggcttttaaaaataatactctatataaatggcttgattgaaaaaaaatctgatacccccaggaataattactggatctgtttaaatttctttgcctcttttctgttttttcaaataaatgatatcaagtcctccactataaagatccaaaattagctctttcaggtttatgtgtctttcccaaatggtatgttgttcaaattaaagtgattaagaaagcaaatgctgtactggagaatttgtgaggatctgaaaataacacaaccccatcttttttaactgataactttttgggggaaaataaaaacgatgctttataatcatagataggtacatgtaagtttcacttacataaaacctaagacatatctatcacaagggaattaggtcttatttagtcagggatgttggcttttaagacagacactttactcataccaagaaaacatatacagagacttagtaggtcatatacacaaaggacaagaatgaagtgggttcagtaccgatcaaatccaaggactaaaagaacgtggtattcgcttttgcttttcctctcactcttgactagtctctttggcaactcatctctcttatctctacttttctatatattgggattatttttctcttctttcataaagttctttgtgacgagggaaaacacacagaacaagcaatggtagccttccaccatcctcaattagcaactgcagagaaaggaaaaaaaggcaaagctgtttctccaaatgcttgacatacaaaaagtccccaaagaggacctgagattgctggtccatttcttggactcttagtcttatctgatcttgtgagttattttaactgaccttgcctagatggatcatctgcccctaaagctggtgttgtgcaactgctggctcctcaagaaggtttcctgaagaaagagggagtaagctttatggaaaagagtaggaagagaattctgaacctacccaaaccacagaagtctactgtggacattttagactcgtttaaaagcaaactaacaagagatgttttaaataaaatatttggaaattgctttatcttttaaataatacactacttaatgcacatttcttttttttttttgagacagacttttgctctgttacccaggctggagtacagtggcgccatcttggctcactgcaacctccacctcccgggctcaagcaattctcctgcctcagcctcccgagtagctgggattacaggtgtgcaccaccgtgcctggctaatttttgtgtttttagtagagatggggtttcaccatgctggccagactggtgtcaaactccttacctcatgaactgcctgcctcggccccccacagtgctgtgtctacgtctgagcttgcagaccaggaaagaccaagtaatccatcattcactttgttctatttaaccattcctattgtcatcatatgtgatttttttttttttttgagatggagtcttactctgttgtccaggctggagtgcagtggtgtgatcttggctcactgcaagttccacctcccagtttcacgccattctcctgcctcagcctcccgagtagctgggactacaggtgcccgccaccacgcccggctaattttttgtgtttttagtagagacggggtttcaccatgttagccaggatggtctcgatctcctgaccttgtggtctgcccaccttggcctcccaaagtgctgggattacaggtgtgagccaccgcgcctggcccatatgtgatttttaaaaacttttctgttgtcctattattctttacagcctgtaagagatgtaaaatccacaagttctcgaatctagagcaggaactaagtcctaatcaatattttagcatacctgtaatcaaagctttggattttccttaatctatgaatgattatgcttcacaatgaaatatctttctttcctcctgctctttgcaaaaggcttctaacagcctccctcacctaccttcaactgcttttcccagctgcaggggattaaacaagttatgagattttcctagcagtaaactttctgaacaaatagaacagtacctaacagttttccattgtggtattagggaatttttcaaagctttaatttttttttttaaagttcttttccaataggttttaattgggaaagttttataagcaaaattaagcaggagaattagattttcacttataaaaatttccaattagaaaagcttaattaaacaatccggctcttgcctccttctttccctttacatgatctgggtgcaggtattccaaaaacgagaggggagggcttaaaaaatcagaagatgtaaaatttcaacatctgccacagtgctaatggagtaaaatgagtatagtgcaatttttttataagttccaaattccagctactactcagtcagttgggacagtgggatgagcaactctcttgttcctgaaagttacaaaagaaaacctttgttccaagtagaaaatctgaaagaaaacctcagctttccaagaaaagaaattgctttaaaagtgtcaaaatcaggaagccgaggcgggtggattgcttgagcctcaggagttcgagaccagcctgggcaacagggtgaaaccccatctctacttaaaaaatacaaaaaaagtagccgggtatggtggcgggtacctgtaatcccagctactcaagagactgaggcaggagaattgcttgaacctgggaggcggaggttgcagtgaactgagatcacaccaccgcactctatcctgggtgacagagtgagactccatctcaaaaaaaaataaagaaagaaagaaaagaaaagcatcaaagtcaaaataaaaatgaagagatgaatctctatatttaatattttatttaagaagaatgaattgcagttcaggacatacacacccactaggtgtcttcactatgtccaaagaacaaagagaaggttgggtattataaaagagacatgttctgtcttgctctttgagaaagtttattggcactagtcaggactgggggagctggcaagtttggttggtgagtgacagcagtgggtaaagttagttttagagttgcagcagcttcagaagtcattaggtaaaactggtttcaggttggagcaagtggtttcagcagccaggcttgcagagaatgacacttcgggagcaatgttacgtgtcgtgagtgcttttgcctcttggtttctcaactgttttagttgggtgtgacaataatgactcaattcatatgatcaactgtcacagaagctactttgaaaagcttacagctatcaaaaattccaccatgctgatcacctcagatcctttttgttgttcactctgcctggaattctcttctctcaggtgctcacgtaaccaaggttgccagactttgcagataaaaatgcaggatgctcagctacatttgaatttcagataaacaacaagtacatttttgctatgcatgctatacactgacactaaaaattatttgttgtttatctgaaattcaattgtagctgagtatctgcatgagttttctgaagctgccataaccaagtaccacagactggagggcctcaacaacagaaatttattttctcaccattctggaggctggaagtccatggtcaaggagttggcaggtttggtttctcccaaggtctctctcctgggcttgttgacggctgccttcctgctgtgtcctcacatggttttttctctgtgcacattcttccctggtgtctctttctcttcttcaaaggccaccagtcttattgtattagggtcccacctttgtgaccttatttaatattaattgcctcattgaaggacctatctctaaatagggtcacctggaaattagggcttcaatacatgatttttgccaggggatacacaattcagtccataacagcgaacttattttatcaggtaaccctgcagaaggcttgtgtcttccccttcatgagatcacaactcagaagccatcttctcagggctgccttcccaggccccctatttaaaattacaaccccctctacccagccccatcccttcttccctccttttcagatgcattttctcctgccagttaccactcttgtttttacttggttatggcttgtctcctcccacttgaaggttagcttcctgagggcaggtagttttatgtaaactttttttctactgtatatgcaaaccagtacctattgcatggtactgacgctggtttggatctgtgtctccacccaaatctccttccaaatccccagtgttgaagtggcgcctggtgggaggtgattgcattatgggagcagtttctcatggtttaacaatacccacctttgtgttgtcacagcaagagtgagttatcgtgagttctggttgtttaaaagtgtgtagcacctccctccatctcctgctcttcctctggccatataggaggtacctgcttccccttcacgtctgccatgattgtaagtttcctgaggcctctccagaagcagaagctgctatgtttcctgtactgtctgcagaacagtaagccaattaaacctcttttctttataaattacccagtctcatgtatgtctttataacaatacaagaatgaactaatacaggcaccgatcaatgtttctccaataaatcaacaggcaacaagtgggaagggggaaaccgctgtctatggctcttgcagctaacaggcccatggagaagagcaaaattttgataagaagatttgataagaagattccagagctgcctccatatccaggtcattgtgctgtgaaatacttgaggagttatataactttcatggacctgggccactcgctagtaacacaagctcctgggcctcatcctcaagcaactgactcaattagacaagggctggagatagaaatctgcatattcaatcaacatctcagatgatcctgacatgtggacaattcactggaaaagataattccaaaatcagctccaaaaccagtttggatcagacaaaaggaatgtaagaatcgaggaagaaggtacttcttgaattaaaaaacctttggtatactgaaactttttgatggttgcttatgcccagagcttgttactgaaactccactcaaaatcattaatctggatttctattgcaaatttgctagggttgctgccctcattttcccaagctttattcccagggcccaagcttaggtcctatgctgaggagccacatctggacctggaagtagatagtatgggccttcacctgtgggctgagctatgaggggatagggcctgcattaggggccaggagtggttatccaatgaaggaagtccctgaaagtggacacagagcaaaccaaaatccaagggaccatacatgagcgtgcttgggagcctcagggcaaagccaggagagccattgaggcagggcggtgagtggaaatggagggagctgtcagcgacccagaactggctgacatttcccaggctctgaagctctggtctgcctcactgcacaccaggaagtgtgtatccctctgcattggtttcttctcttgacacagcactcctgcctgtcgagttgcaggattcagccttatctcatcttactttgggcaaaactggaagccctggctcccgacacgcgccagcgtagcctttgcctatttctctgacttaatgtcatctttcttctttactcctctgtattagtgtactcctctcttttagtccgtatctcaggtctgcccagccctggtacactttgacatggatttgttttctgggaagttctttactttacaaccagatgactgtgttgaagaaggacaaaaagacattcctctctgatttaggctaacctgctggtagtagatcttataaaactataggcaaacaatttaaagctaccttttaaagtctccacatttctccagaaaatacaaatgctttcacatacaaccctggaacatttctttctcgtaacatttccaatcatgcttttttattttaattaaactctgccacttatcaaaaagaatttataccagcttcctaatcatttttggaatacctgtcttcctaataaatgtctaacctgagatacttgcagaaatattatattttcttctccacctttattctatttagaataagtcaagaataatattttaatttagtgtattaaattgtttcttgccatattctgtttttttttttcagctggcgctaaattaagtctgcaatttgtgaaaacttttttaaaatagtaattcaaaattcacatatattataaaactaacaaagttttttaaaaattcgaaatcatgtgttcagtctcacttcaaaagtggcacatagtaaatgctcaagaaatatttgttgaattaataaaatgaaggaaatgaaagtgtcaggaggttaaccactcagccactaaattgctttatgatttggggttagttgggtaactttgagcctctgttatttctctcacaatatcttataagcaccaagtgccataaatattcaggaaatgccttgaaaacattaagttgcaaatgtaagtaatgtattttttgcagaagcagagagactagtttcttcatgagggctaatagctggcctctgtgtacctctttttcttactacatgtgagattaccttcgaatctatatatcagccacaatgacaatcttggcatgaggttttgcaggaatgccaagtgacatgggtccaagggtcgtggatctcatgagaaatggctgttgaggacaaagagatgcaattctgttgaccacagtgctcttcttctgatgtcaaaactcccgttcctgttacttccacaagatcactgtttgctcatccggatcaaggcagcaaacatgccctgagagcaacctgtgtccacttgaaaaagatggacagcatcgtgcctcacctctgtctgtgagtggcagactggaaaggaaccgacctgaggtcttttctttcatgctgggctgcacacaccatttctgtgttccctgttatgggcaagctgtgatggaaggctgaaaaacctcaccacggtgtgttcagtcattcaaccatgcacaaacaattagctactgcatgatatgtgtcttgctctttaaaaaaaaaaaaatccatttcgtgtggattcagattccactttcaattttcagtcgtgatctagaaatctgcacatatgactataatatttaaaagatgaatatcagaaagagaaagcctattagaagctaactttgaagagacggtccaaagggaaaaataggggtgatggtttggagagaaaaaagttatagataatgagaaaaagctgagaagagagatccctttttcatgctgtatcagttagctatgctgcctaacaaatcaccccaaaacccagtgacttaaaacagtgagcatttattatttcttgctactttgctcatcagctgggctcacctgccagtttgtgccaggcttacttatgcaggtcaggtaaggccaggtttaggccattgagaggcagatgtaggatgcccttacccatgtctgtggttggttggctgttcctgaggcaacagacagactaggccatgtgtctcccaacacccagcaggctaacccaggcctgtatatatgactacggatttccaagtgagtagaagcatacaaggtcttcggaagccagtgattgggttcagaacatgccaccccataatatagcaccttggaatttgagaaaacagcagaagtaagcaggtcactctcaccttcctctcaacgcttctcccttgaagctgaccttctcctgaagtagatcataaaaacttctttccagaggtgccctccctatacctggaggaaagaaacattcttatccttgaggacacggagaaatcaagaaggatctaaacaaacaggctttgctaagttttccccagtttattactattaggtcatacccccattgtccactcatacttctgcacaactgtttactctttatcaaagctaaacataaaaatagttttttctctttctttgaatcttcatttctggagtctcccatgtaatgtaaaacttcattaaattgttatgcttttctcttgatgatctgtttcttgttataaggcttctcaaccacaatcctagcaatggatgagaaaataaatcttctctcctacaatggccatggtacagtatcacctctgctgcaagcaattggccaaagcaagtcataaggcgggccacattcaaggggtaggatattaattctgtgtcctcctgggaggagctgtgtagtctctttgcataggatatggattcagggagggctggaaaatcattcccttggctgcagtcaatatactacgcttgcctttcatgaacttgtgaaagtcctacatgagtgtggatgtgtttttggtagagtgcacaaagctggaggtaagggttcctgtgtaacccttggattcctgaaaggcatgtgaagccgactgtggtagaggcctctggaaaagctccccatgttaaaaaacccataaccttctcttctcaataattaagcctagtgctcaaatgtcagccaacagatatttattgagcatccagctatgtctggcactgggggggtgtagggatgaaccacaaggacacagttcctgacttcaagctaacagagaaagcagacagtaaatgattccatgtgtgttaagtaaagcacagggcctgccacttctccagcaataacccttggcatttctgtctcagatagatgtacttgcattttcgcactgcatttccttgctgttcgggcctctgggcctctctacagactggttcctttgctggatgtgttctctctatactgacagcttacatcttatctttacccctcctgctgagctcccacccatccctcaggctccagcttcgaaatcacttcttctgggaggtcctccttttatctgctgtgaactccaggattctctgtcatcacagtgtaagtcttatcttgtctctccctgtaaccctgcctctctctcccaggagtctgagactatgcctcagtgacatgagaatcatttagagctgaagacttctgggaatcaacagctgcaggaagaagcctttctgaacaccctttatctccctaaaagcaaagcctctcaaaagaattcagttgtcataacttccctccccaggagtttcacaaccagagaaaaaggactcctatcactagagatgagaagtcacgtcagctcctgaataagaaatcacctaaaccaacattgtcataaaacaaccagaactctcatgtgttctaagggcccgtttatttttcctaaaagtcatgtggactcccagaagtgcccctctgcccttcttcatcccctattaagatgctatttaagccccacatttccaacctatctctgacacattttttggcgaaaccctgtgtgtgcctgtgtaattatatctgggatttttccccctcttgctaaactgtcttttgtcagtttaatttgcagtttgtcagtttaatccttcaaaaactgaacctaagaaggtagaggataagtcttttttgtccctgacactctaaaactgatgcaagggagattctctttctgtccactataatgtttcccaaacctgccacagggtctagaaaagaggagggctcagtaaacggtggattgaattcctggattacaatagctacttgactggcctttctaaatttcagttcttactctctacagagaaaggaaagtgagcatagttttttttttttttattttctccaaatgctttaaaatgacacatcctctaagccaagagttggcaaactacagacccacatgccagatccaggccaccaccttttttgtaaataaagttttattggaacacagccctgcccattcaattatgtatcttctagggctgctattgtgctacagaggccatatggtccgaccagcctgcagtatttgctatttgtctttttgcagaaaaagtgtgagcagagaggaagagtgcccagggactacaggaatttaatcaacttgagcaatcagactgttttacatcctcccagctgacagccggttttcccccaaattctgtgtggaatgcagccacatcgtctattgaaaccagctcctgacagaccccaacaacttatacatgaacctaagtgaactatcctcagttccatgctaaattctccaccgtgggaggggctacagcttcattagcataacatgagacccgtgttgctggcaggatgactcactacatctgcccaaatggggcctgtcctctatatgcgatgatccaccctttcctctctcacccccataaaaccctcctgtcgcttcccttggggagacaccgctttggagaacacttgtagtgctctccttacttgtgacaagtaataaaactcctattgattaaaatctgcattctcatgttactcgccaggcaaataaaccctgttttttctcgggtgacaaacctttacagacttctgatctaactagcttctatctgaagggatcttcactcagcaaacatttcgtaagtgactattctgtttctcacactgttaggcattgagaacacaacgataaatgcaacccttgcctgaaaaaattgatatgcatgacatgcatgtgaggagccagaaaatttccagattttgaaaagtccctttataatatttacagacaaattttaaactggtagttattaaattctctgtcagagagttggtaaatggtgaaatgtcaagagaaacaaaccaaacaaaggatgtttatgcttgaaaatgtggaaaaaataatgaaaggcagaactgagctaattctaggttctaaggttttattttaaagggtacaggctaggtgcggtggctcacgcctataatcccagcactttgggaggccgaggcgggtggatcacgaggtcaagagatcgagaccatcctggccaacatggtgaaaccccatctctactgaacatacaaaaattagctgggcgtggtggcacgcacctgaagtcccagagtcccagttacttgggaggctgaggcaagagaattgcttgaaccctggaggtggagggtgcagtgagccgagattgcaccactgaactccagcctggcgacagagcgagactctgtctcaacaacaacaacaacaaaaaaaaaaaaaaaaaaaaaaagataccagaggaaatagtaaaatgaaaaggataaaagacaaagcaaaaaatgtaaagaaaccagttggaggaggggtattgatctgaaggtcttgaggcaggagtaaggactcactgtccatgggcgtcaggcaggaaacctaaatgaataaggcagacaaggtgtagggaaagccagtgtgcctcttggccatctttcattctcccactttttatggagacgtaagtgtaggaagatagttctctaccagaagaaaaggaaattaattgcaagacaatgataatggagagttatacatcctcaggggtggggggaactggagcccaggagaaatgggggcacatgccccttccaaagagggtggctgctcctcagagtctgctgatcccagcctcctgagaaaataggaagacaggactagttttgtgccatcttcctagtttccaagtgaagctagggatccacctttttctgtgaaatatcttttttaaatattggcttgagcttcctaagagccataatgaagggaaaacaggtcccaaatgtgggcaaccactgaggctccaatagaaaggaccttgttggtcaggagttcgagaccaccctggccaagatggtgaaagcccatctctactaaaaatacgaaaattagcggggcgtggtggtgcacacctgtagtcccagctactctggaggctgaggcagaagaattgcttgaacctgggaggtggaggttgcagtgagccaagattgagccactgcactccagcctgggtgacagagcgagactctgtctcaaagaagaaaatttaaaaaaagaaaaaaaaagaaaggaccttgttatgtataaggcagtatatgtaaaatattatttacaattatttcaacaatagaagttttttcagaagaaatggtagctactcagacatggcaatctctggtttttatttacgctgacgggggaaagagatttgctttgaagtgacttgactggcttgattggcaaagctgtagagactgataatgttgtacttgttatcttcactctgcaattcttcagcctgggccttcatttcaacaggcaccgatacaggtcccagctggatatcagctaattatgtccaaagacattaactgataatggctttaaagccttacatttgcaagagttatttaaattttaaataagaactcaaagatggaaattccatcttctttcttaccaatccttttaccaagaaccaaagcattattaaacaacaaagcatgaaacaaatgaattgaaggccctcaatagatcatagatgacatggcacattttagatttcaagtggcatcaattaattaatttaataaaaatgaagcttttctttagttctggaggttattaggagtctctattgatactctttatgacattccagcatccttaaggaaataaatctaattaatgggaataaatgagaaatttcaagagaaaaagaaagtgtgcgtttttttctttttcttttccttttttttttttttttagctaggagcactggatctgtttactggaaagattctattttaatgttggcccctcacacagctgaacttgattatgaagagagaaattgtttggttcattaggctttaattatagagatgaattattatggataaaaagaggaagccacagaattatggagattgaattccagttcaataaacaacttcaaatatcttgactggagacataaactagtcatgttctttttttcccagtttaatttgatgtctgttgacaaatgatattggaatgtccctgaaaaaaaaaacttcatatttacagtgtgttagaagttatcatttaaattacacttccttctctaattatattttctgatggtgtacgaagatagataggtgttgcttccacatgaatttattttgtgtaataatgacaaaatgttgcatttctgttttgccactattcatgtaatcagattgcatttataatagctcaaaagccctccattggaaccccaatgtataaaaagacaagctaaaaaccctgagcttgagatttaaggactttcagaatcacatccaactcaaatacttaatattatcattccatattttgttgtaaaggtgcaaagctttgactgtaacaagtgttctattcaccatctcacaaatagtccttacatattcctgcttctgagattttaggcacatctcttcctagtctgaatttgcccttttaaattctacttacctaatgcctaaatgtcaggcccagttaaaaattatgcttcctttggccttctgagcataggactcagtggatgttgataccactctctgattttataaaatacttaatatctataacattcttcttaaagactcatacattcttgatagtcttttactctgaagtcattcagtcagattttcagctccagacacataatttcttattattttaacataatagttctatcaaaacattgtttaaaaaagtaatacctgtatggcaatagaaaatctgaaagttgtctatttgatggtatcaaagaactattttgaaattcttaagtgtgatagtattacggtggttatgtggttgggtttttttaagaactttttttatagtaattatgcataaagtaatgtaatgtctagaatttgcttaaaattaatataggagcgaggtaatttagggtatagacaatatgtaggggaagaaaaatatctttctgctattcctaggtttgtggctaaagccacttgaatgaaagacagattaacaagagaaagcatacaaatgtatttaatgtacattttatgtgacatgggggccttcataagggagcaaagaccagacaaacctgagctaggcttgatgaagaacggagagtcgtggaggaataagattctccgtgacaataggatccaatggtaataaactgaggggacttagtagggcctgtttgttcagattttttccgtgtccctgtgtgttcagagagaaagatgctcgtttcctccaggtatatggagggcacctctcacatttgaccaatcatcagtgatggttgttgagtttcaggattatgggggttgatatactatgctatctacttttattatatatgtttaacttcccttccttcctccctctctccttctctttctttcttttttttctttctttctttctttcttttttttcacagtctcactctgttgcccaggctggagtgcagtggcacaatctcagctcactgcaacctctgcctcccaggttcaagcgattctcctgcctcagccttctgagtagctgggatgacaggggtgcaccaccatgactgactaatttttgtatatttaggagatatgggtttcaccatgttggccaggctggtcttgaactcctggcctcaactgatgcacccacctctgcttctcaaagtgctgggattgcaggtgtgagccattgtgcccggactaatttttcactatataaaaagttttcattttgggaggcctagatgggtggatcacttgagcccgagattttgagaccagcctgggcaacatgatgaagcctcatctctaccaaaaaaaaaataaaaataaaaattagcagggcatggtggcacattcctgtagccccgttactgggaaaaggtactactctcaaaacggaatagccacttggtcttgggtaagtcgcttcgcctttctgaagcttcagtttcactctctcaagatgttccagcgaatgccccaacctcagccactttcagctgtaaagtgctgtgaatgtaggcatttaggaatcaaagatagatttttttgaaaatgagagaatatataaactctccagcgtgatcactttaacaccaacaaagtatagtccctctcgggagggagataaaacacacataaactcaacagggcagaaggggaagaaacgtggactgatggccacaagataatgaagcttccattccagggtttgttttgagagcagtgacttggtaagaaaatgttcactcctgagatctgtaaaccttaaaagcccagagggacttggagtttcagcctcagttcagcccggactgggtttacaaagtcactctggacacatggttggtttgaatcagggaattgaaataaatattaaatcacagagtgtgaaaagaccaaggaaaataggttaggcaggtgaaggccaatccaaccagaaccgggttgtattttacggtaggagagtggtgggtctaaacattctgtagtctattccagcatattttcactcagtggccaagatctaaatattctgtagtctatttcagcatattttcttcttgtgcaattgaaatttttcctttcaacaggggtccatgcttcattgccgagtcctctgcaggcagagagaataaataatgtttcagtttcatgatcatcaaaagcccttcaaatagttgaaggcagagaacaagttatcttgagccttgccatggttaactagcctcttcaagaaaggcaattcacacagataaactggaggggggaaaaaaagcacttaaaacttctctggatgatcagaatggaggtatttgcgttttactgagcacaagtgtcagacatctgggggcagtgatactctacttgttagcctggttgactttcattgatcccaagccttgattacaacaggcggctcctttgatatgtgagttattactgcaatgtgttgctgaagctggatgtcatatactaagattatgggaaaacaaagcaaaataaaatccattcttttaactttgaatatgtcagcaactaataggagaaaaaacaactctaatttgttgagtacttgcagttgtgccaaaggcctttgaaaaactgtttgtattataatcacctcaataaaaaagatatttccttatataacaagtgaggaaatgtagagtgacagagttggaatttcagaatagatgacacctaaagctatttccacgcttagtagtttctctacctcggctgcacattagaatcaccgaggaggttcaaagaaggctgcgaccctacccttctaagattttaactcatttgctttgggtgaggcatcagtactttttttattttttatttttctggaaatggaatctagcttggtcacctaggctggagtgcagtagtgcaatctcggttcactgcaacctctgcctcccaggatcaaacagttctcctgcctcagcctcccaagtagctaggattactactagttttttattttgttttgttttgttttgttttgttttattttattttattttattttattttattttattttattttattttattttatattattacaagtagctaggtggcataaccaccacagccagctaattatatttgtgtttttgtagagacggggtttcaccatgttggccaggctggtctcgaactcctgacctcaagtgatccgcctgcctcagcctcccaaagtgctgtgattacaggcatgagccactgtgcctggcggcatcagtattttgtatttgggggttgcccaatacacgttgagagactctatctgccagtaggaagtcactttctctctcttccccttggtttgtataacaaggagcttggtctgatatacctctaaggtaaagaagcagtttagtggataagcatgcaggctctagaagccacctgccggggttcaagtcccctctctgccacttactagccttctgggactctgttaacatgcctccaaaacagggttactaccagtacttatcacatacagtggtgttgggagaataagtgtaaagtgtttaaaagactgtcatctcctctcctatgtcattgctattatcagtggttggcccatctcactatgagccatccagagcccagcctcagatgtcttcttcatgtgctctttgaagacagaatttcactgctgatattcttctgcttccctgggtctaacctgtcgcctcccacttctctgatcttcactgttttcctatttccccattatagtcttcgcctaaaactttggttccaacaagttcaggggttcattattctattgtacctactttttgtcagtttaaaattttccatttaaaatagctaaaattgttttaataaaataaaataataaaatgagcctaaactgtctcttctatctaatgcatgcaccatctggtttccaaaatgtttaccagtggcttctgtctcacatttattattgtatgttattattaataaatccattatgaaacctcattgtttatctgcgtgaatgcctattcacctggatttaccatttaaacattcagaataacccttctggggaatgtgttgctttttctaacattaacacacaatctttagtctatgtcccaagaatgcagactgctaagtttaaatgtatttgctatacatcactgttcctgtcttagatagtcaggcattttttgccaagggtcttattatctgcaaggctttgattgtttattgtgctgttatcttgaggagtattatcagcctctcttatcctctggatgccttggtaacatgcataatgagagtgatggtggacgcttaaggtttagaataacacttaacaactcttagaacggtataatattaaatctataggaaccttggtgatcttctaggccaacccctcattttgcagatatggaaactgaggccccaaaagtggctgcacttgcctgaagtcccacagctattgaacaacacaaactctttcttactctcagatgtctttcctagtcaatatctctgatgaaagagaatgtagtgagggcagagtggagagcagagtgaggatcatgtgagtgtgggggaattgctttcaaaaagtaaacgttgcaactggcctagcttcaacaaatttcttaggttggttctcaaaccttacagtgcatcagaattacctggagggcttattaaaacacagattgctgggatcttgccccggagtctctgattcagatagccatggagcctgagcatttgcctttttaacaaagggactaccctttgagaaacagagtcttaggtaagtacaacagaactcacgttcctgactcccaattattataattgttgttgttaatcattattgttattattctcaagtccagtgctcttcccaacacatggctgtgcttccttgcaaggtagtttatattggcatccgcacactaggttttctccctcttctccttttcactgttatccttcttcctctgtcatcactgaagctcctgttatgtgtctaatgatgaataacactctgcttgagtaacacagatgagctaccatgctagagtggtcactctatgtactgaagcactgttagtggctagaatctcaattaagtcatttcagctctgcaatgtggtgggagaggtaggcaatcattcgcatttacaatcttcaggcaagagaagccaagagaacgctttcatattcttgataagttatttcttctgactcactcataactccaattgtgacttggtatcaaaggagtaatatttgaatggcttatgcagagttgttagaacactgatcacaagccagataccagataccaggactgctttcccttgataatagcttctgaacctctttcccttataataatgactcaggtcgaaatgcctcatgcaactgatacatatgttgactacatagcataagaaattctatgctgaaaataagaggcatattgctatccacattatatatggtaatgcacgtgggattgtgttcccactaacaatgaatcacgcatttcaatttgagtcagtattttatgatgtctgtccataggaaatatgataacatgttccagaagttgtgaaaggacctttcttttatccattgctacaaaagtcattgcaaaaacacatcccaagtagatgagaaagggacagattcaatctcctggggaaaaacattgctgcattcaaacccattgataagaaaaacttcagtctctaaagccataaatacttaaggattcctaatacctggataatctggttcttctacagtgccttgacttctctactttccttattgaggaatggttcagtcttgtttgatttttatttttaatatattgctcccattacaatttataattgtaacaaagcattacatttatggtgttatgttaagaagaagaagaaaaaagactatgtctctatgaattgagtaaaatagttgctcttgggacctggataagttatcagctcacaaacagttatactaaacattgttctaactgggatgttagtgtatttgcctgtattttaaggttgatattcaggaggacaatcagacaacatattcctttgtgttgctttcagagagaggacaaggtggtgactagaccatggaacatttcaaactgaagactgcatgaaatctgatgggctgtgatccaattaacagcaaagcaattcaacataattgacccccaaatagtaaagccatttcattgattctattttcactcaactaagttgcacgttactaggtctttgcagtggttgcagtgtacttgaacaaataaatgagaacacaggtaagtatctgtgcaggtgtggggtctgaaacagaggatgcccagggacagcaggaggggtcgctcaaaacagagctccttccctcctttccctgccaagccaaggctattaccatgtagtacattgtatcattctgtcatttttcagttctctaattttttccagctgtgagccaatcagattgctgacacccctttcatgtctcttgcagcattatctagggattcattatttaagaagccattttacccatgtgtgtatgtgtgtacacacagagaataaagtccctcttgtactgttggtatgatgtcaggggcagtttctcactcccttctacaaagctttccttcttctgatgcagcaattagtcgactattaataaaaagacattaggttatgcttatttatttttaaagaatgacatcattccaggccttaatgtgtagcaatggagcaattcacaggtctttccatttattacatcatggaagctgattgaacttggcaattaccttgctgttttcccaacagttacggaggtgctgaaaaaggacttggttgcaaggggctgaataaacatatatgtggctgtatgtcctcttattttgttaagtgagtttgtgcccagtgaaaagtacccacagagcctagtttagagtacagatatcctcaatttattccatagcaaatctacaactctcagtctgagaggtttcgaataaagtcgtgttaatctttaattagttcgctggccatcagagactatcagaaaacaagggctgctaactaaaagctacaaacctcccatttctaaattgagccattataggagcataccagctgaaacactcatagattcataggattttgaaaatgaaaaggactttgaggttcaattttagacataggggaattgaaccctaaatttctgaggagcttgattaattctgcacagttagcaagtgggaagactgggtttatttccacaatgtgataataccccctcttaaacatgctactgctctagaatatggcagattctctttccataagtagaacttatgatattttacttcaatttacttggtactttgtattgaattttttttttttaataatcatcttgttgcaagaatactcaagccataaggatgcttcccatgttgaatgactttatactataattcaagactcaatgccaggacggttcaaatcactgatgctcatgagcaactggaatcatggcacctcccccttcccaaaagacttcacaatttaaggacactgattagtcttcagcaacaaaatcaatttttttcctcaactttcattatggtcaagggcaaagcagtggtcttatcaataaaggatttgattatgttagtcattaagaaggtaatcagatctattattactcagtgatggaactgccacaggcctaactaattgaatataaggacatggcctttgaccaaagccagtcaagggaaacttctttttccacactcacagcttctgcttataataaggccttggcatgacagataatgaaaagactcagaaactgaccattgatgttaccaatatgtatgtgtttccagaatcaagattcagatttacaaaaaagatgcgacaatttgttcaaggttgtaagcaattaggctccatccatgaatgcacttaaaagattgtcatccaactcaagctatgggtttcaaaggtttgcagagtttttaatacttttgtgtgttttcaggacggaagaccactgtaaaatgacaccacataaatatgactgtttcgtgtgaggatatttctttctttttctttttttttttttttttttttttttttgagagggagtctcgctctgtcccccaggctggagtgcagtgtcatgatctcgactcactgcaagctccgcctcctgggttgacgccattctcctgcctcagcctcccgagtagcagcgactacaggcgcccatcaccacacctgcctaattttttgtatttttagtagaggcggggtttcaccatgttagccaggatggtcttgatctcctgacctcgtgatccgcccacctcagcctcccaaagtgctgggattacaagcgtgagccaccacacccggccgaggatatttatttcaacatttatggtgattgtcccatccataggagagtaagcacagcacctcacatgaagtggaccatcaggtgtgtttaccaacaataaatggactgtattactcagccccagactccaggaagaaaacttgtccataacaaaatatgattagctgaacaatatggctggtgcagcaacacaaatgccttaaatacacaccagccttaccactgtaggggcagaaaagtgtgaagccttccttcacccatcacaggcgtcatggtcgacactcctataataagaaacaaggtaacaagagaaatgcataacaatcttattttatcaaagtcttacttgacacagagctttttgaactgaagacccaaagacctagagaaaactatctatttttatgcttaggttcaataaagaatgcacagccatatagaaatctgattggacaaaagggtgtgatctcgtggtaatagactgaggacaggacagacccagcaaggttcatctgttcagattcttcttggtctctcaatgttgtgtctcttccccaagatataggacaggacccctctggaattaggtcttcaagggagatgagagaaaggaagagtgacatttctgggttttacgacttgctttggggagaatagttctagtttcttttctttttctttttttttttttttttttgagacagagtgtcactctgtcgcccaggctggagtgctgtggtgcaatctcggctcactgcaacatccgcctcccggattcaagcaattctcctgcctcaacctcctgagtagctgggattataggcatgggccaccacgcctggctaattttttgtatttttattagagacagggtttcaccacattggtcaggctggtctcaaactcctgacctcatgatccactggccttggcctcccaaagtgctgggattacaggcatgagccaccacgctcagtgaagagttctagtttatataacgtgacttgggaagaggaattctggattctatgacttgctccagaggagaatgagggacaagagaggggagagcagaagaatattagagaagccttgcttctgagaccttccagtcctcttgttcaaagtactcagtgggtcaaggtgccgtagtttgagatatcatgttctgagccacagccccacagattccagcacaggatcctaacagttcctataccatatgcatggccaatgacactaggtattggacaatttatgtatccactagactttgttacttaatgagaggcacccccagcatcgacattgctggaagcgtgccaaagaaacagagtcttgggctcccaccaagacccactaaatgagaatctacactcaaacaagatccccaggtgattcatttgcaaattaaagtttgagaaaccctgttttagagaagtagttatcacaacttgaacacactttggaataatgaagagttttagaaaagacgaatgcctgagtctgaccccctagacattctgatttaattaatatgagggtacaacttgggccctgggattttaatgtgtagcagtttgccaacctccgctctagagcagtttctcaagcttcattgataaaaatctccaggaaatgcatgttatagtttcaaattctcaggattcctcctggactcatgatttcagtatctccaagagccaggttttggaggctgcatttttaccagcaccctaggtgactcttcatcaggaacgtttggaaaacactgtttcagagtagttcaaagacatagaacccagaaaagaaggagtatctatcaaagcaatgtgcttcttgactctcctaatacatggcattacttcgtgtgtcatcatagaaatgcccattcatgaggcacaattatgaatttattgtgcttggttcactaatgaattgtgttgactagtaatctctatattttagaacaggatctttaaattcatcatttactcattcattcattccaaaaatatttattgaaggctataagtaccagaccaagttctaattacagtagacccttgaacaacatgggcattaggggtactgacccccacactatcaaagacccccatgtaacttttgactcctccaaaatttaactactaatagcctgctattgactaaaagccttaccaatccacacgttttgtgtgttatgtgtattatatgctgtattgttaaagtaagttagagaaaagaaaatgttattaagaaaattaaaagagaaaatatatttactattcattaaggaggcgtggatcatcacaaaggtctttatccttgctgtcttcactttgagtaggcggaggaggaggagaaaaagtgggcttggtcttgccgtcccactggttgcaaaggtggaaggaaatttgcaataagcaggctcatgtagttcaaatccatgttgctcaagggtcaatggtaccgaggatataatgttgaacaaatagaagtccctactacctggcatctctattctaataagagactaaatagtaaaaaaaaaaaaaagtagtaaacaggataacctagttatatatttgaggtgttgtgaaagaataaaactcattaaatagcagaaactggctaagggtaaagagtagtttacgttaggcaggctaatgggagttagatttattaataaactatgagaacctctttaaaagaaactcagaaaagtgtgctccagacagaggaatagcaagtgcaaaaggcctgagctggaacaagctcagtgtgttctaagaatagaatatcaatgtagtggtttcacagagaacaggaatgtttcagggtgaggtggcagaaacaagcatggaatcaagtcatgcaggatcttgcgggccctgataaaggggttgggtttgactcaaagaagagttgaaagtcactggaagattttgacagacaagtgatatgttttggaagctttttggagaatgaattttggtggtcagagtggaagcctgttgggcagctattacagttgtccaggtaagagatgaaggttttttggcctggagaaagttcacctattccccagtgtttgttctatcgaaatatttctatcagttgattttcttcccctgtttaaggaaaaagaaaaagaaaaacagattttttttcccctgtggtttttatgttttatagaagcctttttttttctttgtacatccaaccagaacaagtgaattcttaccattttcggagtgagagtgggggaggactgtccacccattcctgatgagccttttactatggtttaggtaaagatttttattcataaatctctagagtatttgcttttcatgactttttttctaactttggttttgaagcccctttaatgctctttgtcaattgtgcaatgctttccatgtgagtggaaggagaactcataccatttcgagtggttaagtgcctttaaatgatttaaaatgctgggaagatatttaagtctttggcagggggatttgaagagcatgttatttccagctgtgggttaggtccatatttggatggagaaattcttagcatcaagaatatcacagaatacatccaggtgtttttaagagctgcaaaaatgtcacagctaagaagaacctttcattgttccttcaagatactacactgccacactcctttctcaatgaaaatgaataccatgaatcgtgctgctgaaaggactcttggattcaatccaggaggctaggaggaaagtgggctttggagaacattaaaagcaggaaactggagcaggagagtgtgggcacttgcgaaggtgctaaagatgaacaggacttagctttgtaaagaaggtggttgggggtaggtggtagaaaattccattctggaagagtaagagttataaagaatgggaattgggaggggaactcgaaaagtaataaagcattacatttatggtgttaggttaagaagaagaagaagaaagactatgtctttatgatttgagtaacatagttgctcttgggacctggataagttatcagctcacaggcagttatactaaacattgttttaactgggatgttagtatatttgcctgtattttaaggttgacattcaggaggacaatcagacaacatattcctttgtgttgctttcagagagaggacaaggtggtgattagaccatggagcatttcaaactgaagactgcatgaaatctgctgggctgtgatccaattaatggcaaagcaattcaacataattgacccccaaatagttgactcagtgacacatggatagagctttgacagcttagcagtgagatcaggaaaggaaattaatatgtgatttaagtaaattcaggaatctggtagtttaatggacttagacactttcatcctttgttattaaattgaatctggcccagttaggagttattggaaaattgattgtaataaactggcgtctgtgatatgcttcttcctggatcacctgggggaaatgattcaacaacagcacaggcacacactcacacacttaacttacacagacccaccttgtgtttcttcctagcagggtgggtgtaaagtgtgataaatggtgaaaaggtttggaaccaaaagtaggacttatgaatgccagaaaacccagggttggacatagttcaagcaacacatttttaattaaaagaaaaaattggtcttaagcttgtttcttctagattcaggtttcatatttaatctaacattttcatggctgctgtaaggacttgggtttgttgcttaagtctcccttgaaatacctgtttattcattgggttttagactctactgctgtgactcttcccccaccactttatctatgcatgtgcgggtatatgtgtcatgatataatatatgtgaagacagcaggtttaaatttttcattagtttgttagtgcagaaggaatacataattagaaaactttaaaccattaagtgaaataactcagaaatagaaaatcaaatacggcatgttctcacttataagtaggagctaaataatgtgaacacatggacacatagagcagtataatagacactggagtctcagaaaggtgggatagtggatagcgggaggtgttggtgagagatgagaaattacctaatgggtacaatgtacactatgtggatgatagttacactgaaagcccaaacttctccagtgtgcaatataaccatgtaagaaagctgcacttgcacccaacaatctatttttaaaattttaaatgtaaataaaattaaattaaatttcaaattatatgaaagtatttgaagcaaaaggtaaaagaatatttaaatttaaatagacattgtcaaatagtcttacacagaaagcttgtgccaatttatactctcacaaacagtatatgagaaatccctttttttattcctttgcatagtttgtataatagtttagtatatgtgtctcagtgtaaacttgagcgtttatgaatgtggagttcggggtttgtttgttttcatttcacaaaatgatgttgcttactgttctccaggctccctgtctgcttcatattcctctcaaacagcaagctccagccagggccaggtctatatccttactccttccttggcctgggagacttctttgattctgctaagttgtcatcttctcatcttccaagccttagctcaaacaaaattttccctacagaatttccctctccactgttatagagaaatcccaattcactccaaagtaaccatctgtatcacacttctctatttatttccctcaaagaatgtatcagaatctgaaatacccttgaccatgtatttatttgttttctctctctctgtattagtccattctcacactgctaataaagacatacccgagactgggtaatttgtaaaggcaagaggtttaattttctcacagttctgcagagctggggaggcctcaggaaaatcacaatcatgatggaaggggaagcaaacatgtccttcacatgatggcaggaaggagaagaatgagtgtccagtgaagggggaagcctcttacaaaaccatcagatctcatgagaactaactcactatcacaagaacaggatgggagaaatcaccctcatgattcaattatctccacctggtccctctcatgaccaggggattatgggaactacaattcaagatgagatttgggtagggacatagccaaaccatatcattccatccctggctcctcccaaatcttatgtcttcacaattcaaaacataacatacccttccaacagaagtcttaactcactccagcattaactcaaaagtccaagtccaaagtctcatctgagacaaggcaagtcccttctgtctatgagactgtaaaatcaaaagcaagttagtttcttcgtaaatacaatggaggtacaggtattgggtaaatacacccattccaaatgggagaaactgacaaaacaaaggagctacaggacccatgcaagtctgaaatacaatagggcagtcattaaatcttaaagttctaaaatgatctcctttgactccttgtctcacatccaggtcatgctgatgcaacaggtgggttcctatggtcttgggtagctccgtccctgtggctttgcagggtacagcccccctctaggctgctttcatgagcaggtgttgagtttctgcgccttttccaggcacatgggtgcaagctgcaggtggatctaccattctggggtctagaggactgtggcccgcttctcacagctccactagtcagtgccccagtggggactcggcactggggctccaaccccacatttcccttccacactgccctagtggagtttcttcttgagggctctgcccctgcagccaacttctgcctggacatccaggtgtttccatacatcctcttaaatctaaatgaaggttccataacctcaattattgacttctgtgcacctgcaggctcaacactatgtggaagccacaagtcttggggattgcaccctctgaagccatggtctgagctgtaccttggccccttttagccatggctggagaagctgggacataggacacaaagtccctaggcttaacacagcaggagaaccctgggcctggcccaggaaactgtttccttctcctatgcctcagggcttgtgaggggaggggctgccatgaaggtctttaacatgccctagggacatttctcccactgtcttggtgttaacatttggctccttgttacttatgcaaatttctccagtcagcttgtattcctgcccagaaaatggggttttctgttctatcacattgtcaggcttcaaattttccaaacttttatgccctgtttcctcttgtatgctttgctgcctacttccaccagatgccctaaatcatctctctcaaatttaaagttccatagatctctagggcagggccaaaatgccaccagtctctttgcatagcaagagtaagctttactccagttcccaacaagttcctcagctccatctgagaccacctgaacctggacttcattgtccatttcactatcagcattttggtcaaagtcagtcaacaagtctctaggaagttccaaactttcccacattttcctgccttctgagccctccgagtctctaggaagttccaaacttcaccacattttcctgtcttcttctgagccctccaaactgtttcaacctctgcccgttaccgagttccaaagtcactcccacatttttgggtatccttagagcagcatcccacttctggtaccaatttactgtattagtccattctcaacatgctgctaataaacacacacacaagactgggtaatttataaaggaaagaactttaattgacttacagttctgcagggctggggaggcctcaagaaacttaaaatcatggagggaggggaagtcaaacaaatccttcttcacataacagcaggaaggagaagaatgagtgcccagtgaaagggaagccccttataaaaccatcagatctcggtggatcacgaggtcaggagatcgagaccatcctggctaacatggtgaaacccatctctactaaaaaatacaaaaaattagctgggtgcggtggtgggtgcctgtagtcccagctccttgggaggctgaggcaggagaatggtttgaacccaggaggtggagcttgcagtgtgccaagatcacaccactgcactccagcctgggagacagagtgagactccgtctcaaaaaaaaaaaaaaaaaaaaaaaaaaaaagaaatcatcaggtctcaggagaactaactcactatcacaagaacaagatgggggaaactgcccccatgattcaattatctccacctggtccctcccacaacacatggggattgtaggaactacaattcaagacaagatttgagtggagacacagccaaaccatatcactggtggagcaccagtgtcttgagatccgagatttgtgtgtcttttactgtactctttttccaacctggcccagtggctgtcagagaatgaagttgaatttgttgtactgatggattagcagctcctccatggtcctggaaggattaacaggccctgaatggagaggagggaggcagatagacatggtgtctgacatctccactgatgttacagcttcatacccagtagttcttttgagataaacatgatgttccccattaagctggtgaactttaaataaacaagagagggttttttttttcctccaggttctccttttgagatgaaactgtaggaaatctatcacatttgaaattcttgctcatgtttttctatttagttcaacttattttccaaattacaatttgggtcataaataccaaaataagttgcttggtatttttgggaaaacagtatattaatttatctgatttttgcattttttctacttctaagaaaaaacaggagacattcatggcaatgtgatatgacaggagattgtcctgttggtagtgatggtttgttttttttctgtattgcccacccattgtacagcattcagagaattctgaaagtataaagaaggaattgtaattcttaaattaccttttattgtcaaaataagcatttttttcttgagctggatttctcaaaagcaaacactgagagaagaattggcatgtacgttatttattttggaagtaacctcaagatcacctgtaggagagtggggaagtaagaggaggaaggaaggtattcgacagaaagtgtgttgaagagcaggtcaccatcataagcaacgggcttaatcctgctggggatgtctgtgaggctatataatacagacctctgagttgtcccactcagttaaaagtaaattgatgtattcatatgccatgtccggcccatgattggttgagggctgctgctagggatgttaacttgctgggcacccactcatgtcttctggtcctgctccaagcacagactgacgaagttaccatggtcaaagaaagcccttaggctgagactcgggggaaggtacattaaaaagagagcatgcaccagaacagtgtgtggtacagaggcacaggagggcatggacagcgcctcccacacaatcattagagactggctggcatagacccaatccagcaccaagttctaccctcccctacaaacaggcagtgcttaacagatacagcagtaacagaaacaatagtttaggaaaatcaaattcaagactgaacataccaacaaaagtcacctttagtggttgtggcagtgaaccaaggctccaaacatgcttgcaccaggtgacttggtctcttgtgttcctgtcattcaccaggaggagaacatgcacccacgtagttgcttgtccaaggagagtgtgaagtggggcaaacctgaatccaacccaaatgcagaagcccagcccagctaaatgtcacctagagtagagccaccttagtctgcagatgtgtgagcaagaaaaataaatgcttatcattgtcagtcactacttttcaggattgtttgttatgcagtattattgcaacaatagctgactgacacaatactccagggaacagatttaatagagcaatgagaacaatagtttaaatttttaattgcaatcttcacagacatagagtggatattacagacctttttaaaaaggaagagagaatcaatgagacagcttgtgaattataaatgctatcactaaaattaaaatctcagaaatgtggactaaatggtatcatggatacagacaaagaagaataaattcttgagttcctagatacagcctaaaacttgacctgatgtttagcacaaagaaagaaaaaaataactataaatcttgataaatgatggatagatccaagaaaggaggaaagcaaatgtgagaagtagtgatgggaaaaaatatcgaagaattaagagctcatcaaatatttgagaaggaatgaatgaaaaagggccatcactgagatacattgcggcaaatttttattagaataataaaatttgaggtagagaaaaggatacctatgagggaaaaagactgaattaataccaatgctctcatcagcaatgttggatttaaacattaaaattaaaaaaagttttgataaattagaaacagagggaaattttactaactaactaaatgataatcctaggaacctatagcaaacgtcatacttaatggtgaaacaattaaattattctttttatagtttgtcaattttaattttcagtttcaaatatgtcatacgtaacttttcaagctaaattgatacagatctatacaaagagtgtgaagggttgcatactatttcattctatacctgatgtgttctaatgtatttagtcagtccctcttttgtaggggattgatgatgtctaatttaaaattgaaaaatgtgcatgacagttgaaaattcctctaccctctctaaatctgattggatattaccaatatctttaatcttgagtaattaatgactaaaaaatacatcttctgggtttattaaaatattcttttacaagtactactctgcagtgtatatgctgtggaaattttaaaaataaaatcgaaaaataaaagtactactcagctcaggaggctaaggtggaaggatcgcttgagtctgggaggtggaggttgcagtgagccaagttcatggcactgcactccagcctaggcaacaaacttctctcaaaacaagcaaacaaaagaaagtgccactaaagctaaagatcctcttatattttttcattcaatatgaatgactggtgaatacgtgcaccaggtctttcccgagcaataggaatacatcactgaaccaaatgcgattcactgccctcaagaaccccatgtcttccttcttttaccagctatctgttaatctactcagctggtcttcttgctccctttgatttttacaaaccattcatgcattagagtagtaatcctttgtcatgtgtgttacaaaaatttgtagcacgctgtttatgttttagctctttagagttcttttgtggaatctcagggaagttttgactttatgtagacacattttttatgtttgcctatttttctatctatttatcccaggattgaagaaatagtctcctacattttcttctaatatttttataattattgagcttttaactgaaacttttaacagatttattccctgcctgggcatgacttaagaatcatatataccatgtataatctagagtgcattgtttggtaatgaaagagtgctttcacatattaatggttatgcttttactcctgcatcagattctcctgtgttaaacatggtgatgtcaccagaatggtatcaaatcacccaagtcaaaatgttcttcttcgaagcagctgatgcctttagaataaggtccaaaatccttaacatggcttacacagcctttcaccacaggcctccctagcctctccccagcgcagctcaccctcctcttcctggcccctgcacctacttcaattgcggctccctgcacatgtcatgccctctcccctggagccctcctgcctgacctggttgcttctcacttagctaactcctatttatccctcagtttccatgttccctgctcaaggaaaggctggcagtcagtttataaatatttcttgggccacctactaaatgccagaccaatgatcaccctcactccgcaaccaaggctgaagaggtattaatcctatgtctggcatatcagccatcacaacaacttacaacagcctcatggcttgatggtaacaaattgctaggcagcaagcatcttgagggtaaggaccttgtctttttcactagcgttgcagcagctgacatagaaatcaaagtgaatacagacaaaacggtaaaccaatgagagccaggaggaaagtatgatacaatttcatttcctggaaagtgaatagggcaagagaaaatatgcctgttgttcaaatacctgtgccatgggtggctttgaaagaacactgactttgaagtcaggagaacttgtttcaacttgtggtggcatccagtcccaaccctatgaccttgaatgagtaaactttttcagctcctgtttcctcatctattaatcagcataacgcctatgctatccaaatctcagggttattacatttcttgaactttatgatgtgccacacattgcaattatttcattaattttattaccttgtttaatcttcatgctgtatggtggagatattattattatcctcacccataagttggagagtctaaggacactgggcccacatgaggaaattagagagggttacttagtgtagtaagagtacttagagtttatttagtgtcgtctgaaccttggaggggttaaatgagctaaccaagttcacacagcttcaaaatggtagagctgagattctgacccaggactgctcgacacctgagcaagagcacttaatcactgcttaaggctcactcatgtcagaacaagagagtttgtaagtggacaggctttgcaaactgtcaagcacaaggtaaatgctggtgatgaggagcaagtcatttgtacaacaaggaaggcagcggtatcatctggacgtatgtttgccttcagggagggatgaatgcctgggatttcagatctgatccaagttcaatgtgtctggcccaaggttatttttgattcaaggccactgtgtcctggtttctatcaacactgaaataaacaccgctttgcaatctgcgccttttattaatgatgtgactcacttaatgagggctttgctgactcacatcaatcttctttgtagaagaggcccatcaaggaattgtagacagctgccaggctggatctactctgcgtcagcgtttggcaagttcagccaccctgcaaacaccttttcttcagaagaggggaaagagtgaagcttcaaggctaaagatcagcacaacacacacacacacagacacacacacacacacacacacacatttaaaaacctattttattgggtttatctggacattgttgttgtcgttgttttaagttccaggcagccaagcagccatggatggattactcttaaaacctgatcataaaatattgtccacatgggcaaaggcactaatcaaaactgtgaaaggaaaggtttgaattaaggaaaaagttcaatgagacacaagggatttttcattgcaaagtttctctaattttgtatcccaggctgacccataaaggaacaaaatattctgccttgatgacaacatgtgatttagcgtagtctgtattacagaatggccacagcttgaagatggcagcatggtttccccagagtctggagcagaacttgtagttttgtctacacacaatgacccattgaccattttttcctgaggaattgctttttttgttgttgttatgtgaaaaagctttgcccagtctgctagttcttaggtctgttttttgtcactgtccacatagagttcttggaaaacaatacgggctaaccccaagtttggttgtgaatttcttccataataacccacacgtcttgttttacatgtaagttgcttgctgtgtccttctctccttgccctccctatgagtcacccacttaggttgggagcttctagataacgacgccccttccaggaccagcatccgtcccttttccaaccgcacagtcctgcctggactgacgaaggaaacctaaaaacaaggaaagttttcataagcattgcaataaaaggaatggtgctatttaaatgtgagattatacaatagatataacatagagtaacacacaagaatcacctgggcagcactgtaactcacctttccaggatggcaattctgacctcataagaaacatgtagggagtccccttgtagattctattgtttctgggttgagtgatgctggaagtgcggggatgctgagaggctcaaagagattgcttcatttagaggactctctttggctaccatgcagaggtggaactgcagggcatctgtgcggttctgagttgggggtttccacaaaacagtcattctcctcctccccacccctgcctctaggcataaggagtggcagtgcctgagaagaagacatgtggaattcacaactggccttgacagaacacttgggccagaagccaggcaccagcaaaggcaatggaggcaggatagaggattctctccaaagcaagattccctattgcagcaggcagtggtcactacagcagttggccagatagagagaagaactgcagagaggaattcatcctgccagaatgccaggatgaattgctgaagcatcacccacctatctcgttattcggcttctgaactggtaaccagacacccagattaagagctgagaggatgactgtggaaaggaaggggacaaatataagacatggacactgttgagggattcaaagaaaatgaaaagaaaagaaaggaaatagcgcactcaataagtagagaaggaattagggaaaatggtcagaaacagtcagaatgtgggtgtgttggctgccattaccagtcttaacaacacccacaagagacagatgaccgccagtttacaatgggatgggctgcaagcccttggaagggaatacagcttctccaggaggaacattttctgcttgtagtcttcaattttagtagactgagagtttagtaacccttacagggctaaaaacaaacaaacaaacaaacaaaaaccaatttctcctaaactccaaactgaagcagttttaagtaatgacttgaagtcctggaattagcaagatataaaactttggtcccaaatctctgctcaaaaatctttcattacgggatccctagcagatgacatgttctagcctggtaggaatggtaagattacccaggattatccccaaagcctgttgttttagacaacttcaaggtcactattgagaggagggttgcatagagcacagagttcggtttggaaactatatggaaacaagatctttggcagtagttacttacacatgcaactgatgggaagcaaataaacaggaaatctactaaattattaagggaattctatccaaataaatcacaagcttaccctcaaaagccagtaatcattcaacccctaagcaactcccaggccctcaaaactgcaccagcaggaagagagcgaataaagggcacagcccccagaaagatcaacctttccaaagcccaccccagatatgaccaccaaggacaaaaagcaaggagcagaagctgaggctgcaggatgggaccaccaagccatcgaccgacctgccaggtaggagggtctttgctgtggctacttcatggcatggctcattgctatagatccagttggaaggaagaacagaattaggatcacacagtagccactgctcagtaactattgtgtgtttccaattctttttctccaagaatacatttttgttttggtcatcatatttctccttcactgatatagattagatatggaaggacaggaaatgtgtgtttggggttagacactgattgatgaggagccatagcagacatggagaagattgcacatcatcctgcaatcatggagtttgagttgagcgccctaactaaataggacttgggactgtctccctgtggaagaggaatatgccaaaggaatggaacaaatgcacctggatattcaggtggtcaaaagggcagaatgacagagacagataattgacctcaatatctattttcttctatcccagaaataaatgtctagctgaacagatggctagtcagagtgaagaagatgcttcatggcctccctcgcattgtaactaagttctagccaattgtatataagccaacaaggtatatgcaccttctaggaagattccttaataggagggtccaacctcttctttgggctttcttccttcatgctggatggaagaagatgtgatagatggcgctgcagcagccattttgttacttaggaatgaaaatgaaaataagatgggcatcctgatgactgtgaaactaaacttccacagcagctccagactgcctaatgatttttttatgaaagaaaaaatcaactgaatttgtaaaagtcattatttttttccccttggcccttacaaacttaatataactataatacatgtataacctaaaattacccaaagaaatattccaatcaactagtagatggatcacaataaagagtcctcacatagaaaactatgatatgaaagaattgagagtaggtgagaaaactattaaagtaaaacataaagtctaaataattccccagataaggctgtaaaagtaattaatgaataaaaagtttcatgatgtaaagtaatgattatcatttaaaaagttaaaggatgtattcaatcttactgatcattacaatgttactgctgacttaccatgtgctaggcactgttgtaaatgcatcctgtgcactatgtcattttattttcataataaccctatgatactattatgcccactttcgagatggggcagctgaggcacagagaaggtaaaccctttgatcactgccctatgttatctgtcagccaaaacctaggagatggcagagcaaagtaagaagttaaataagagtgttagtttcttcattttatataaagaggactcatgagtgttttgcacttgttattgccaattaggttatcgatggcaatgaagcaaaaacagaatgtatctgttctaagtcactagaggaaaaggtggttacgaaaaggaattacagcccatacaacaaaaaattaaaagtaaaggaaaaataagagaacattaaaaataaagtacaaaactacagaaataaaagaaaaaataacactcattacattaaatgtatagttggccctctgcatctacaggtttcacaactgcaaattcaaccaacctcatatttaaaatattcagacatgaacaataaagaataataatacaataattaaaaagataaaaataacagtataagaaaaatttacatagcatttacattatattagatattataagtaatgtagaaattattttaaggacacagtaggatgtgtgtgggtgatatgcaaatactatgccattttttatgcatgcttggattttggcatcctgggggtcctggaaccaatcccccactggtatagaggactgacagtaaatgcttaaactactctattgaagggtgaagtcccacaagtttaggcaaaatataagatacaacagtgaaatcaatgtactgtaaataaggaccagaaactaacccacttatttagtatatgctaaaagagatattttaagtcaattgatacatgattgtattagtctgttttcacactgctgacaaagccatccctgaagctgggcaatttacaaaagaaagaggtttactggacttacagttccacatggctagggaggcctcacaatcatggtggaaggcaaggaggagcaagtcacatcttacgtggatggcagctggcaaaaagagagcttgtgcagggaaactcccatttttaaaaccatcagatctcatgagattcattcactatcacgacaacagtgcaggaaagacttgcccccataattcaatcacctcccattggattcctcctatgacatgtgagaattgtgagagttacaattcaagatgagatttgggtggggacacagccaagccatatcaatgatgtaattcgccaaatggtagcttatctaccattaactgcaagaattaagttccctacatcaaaatgaagctgaagcgaatcataggtaaaaatatttaaaaagcaacctaaaaaaatcataaaagtatctttaaataatttagagcaagtatggtctttatatacatataagagtgaaggtaaaagcataaatgaaaagatatgtgatacaatagaaccatttaccaaaacacacaataagcaaatcgagatagaagaaattggggcaaaaatagcaatattgaaggcaggaaaatagattaaattcaagatatataacgtccaaaaatcaataaaagataagcaacaagctaaaataaaaaaagagtttgaacataaaatttacaaaataaccatttaaaaaaattttttttacaattttttaatagagacaaggtctcactatgttgcctaggctggtctcaaactcctgggctcaagcaatactcccaccttagcctccctaagtgctggaattacagaagtgagccactgcttccagctagtaaccatatttaaagcatgatactgctcaaaatctaatagcaattttcattactaaccataaaaaggaatacactttccaatgttgacaaagatatgggaaaacatacatctatatagcatttctgagtgtgtaagttagttcaactttggaaaagtattttggcaaaatatacaaatctatcaaacctttaaaaatgctcacctgtttttacccaaaaattctgcttctaatcatttgtatttttaaaataattggactaaagatttaactataagaatgtttggtcaggagtttgagaccagcctggccaacacaatgaaatgaaaccccctctctactaaaaatacaaaaattagccaggtgtggtggcatctgcctgtagtcccagctacttgggaggctgaagcaggataatcgcttgaacctgggagatggaggttgcagtgagctgagaccatgccattgcactccggcctgggtgacagagtgagactctgtctcaaaaaaaaaaaaaaaatatatatatatatatgtatacttatatacatatatacgtataatatatgcgtacttatatacatatatacgtataatatatgcgtacttatatacatatatacgtataatatatgcgtacttatatacatatatacgtataatgtatgcgtacttatatacatatatacgtataatgtatgcgtacttatatacatatatacgtataatatatgcgtacttatatacatatatacgtataatatatgcgtacttatatacatatatacgtataatatatgcgtacttatatacatatatacgtataatatatgcgtacttatatacatatatacgtataatatatgcgtacttatatacatatatacgtataatatatgcgtacttatatacatatatacgtataatatatgcgtacttatatacatatatacgtataatatatgcgtacttatatacatatatacgtataatatatgcgtacttatatacatatatacgtataatatatgcgtacttatatacatatatacgtataatatatgcgtacttatatacatatatacgtataatatatatgcgtacttatatacatatatacgtataatatatatgcgtacttatatacatatatacgtataatatatatgcgtacttatatacatatatgtataatatatgcgtacttatatacatatatgtataatatatatgcgtacttatatacatatatgtataatatatgcgtacttatatacatatatgtataatatatgcgtacttatatacatatatgtataatatatgcgtacttatatacatatatgtataatatatgtgtacttatatacatatatatgtataatatatgtgtacttatatacatatatatgtataatatatgtgtacttatatacatatatatgtataatatatgtataatatatgtatacttatatacatatatatgtataatatatatgtatacttatatacatatatatgtataatatatatgtatacttatatacatatatatgtataatatatatgtatacttatatacatatatatgtataatatatatgtatacttatatacatatatatgtataatatatatgtatacttatatacatatatatgtataatatatatgtatacttatatacatatatatgtataatatatatgtatacttatatacatatatatgtataatatatatgtatacttatatacatatatatgtataatatatatgtatacttatatacatatatatgtataatatatatgtatacttatatacatatatatgtataatatatatgtatacttatatacatatatatgtataatatatatgtatacttatatacatatatatgtataatatatatgtatacttatatacatatatatgtataatatatatgtatacttatatacatatatatgtataatatatatgtatacttatatacatatatatgtataatatatatgtatacttatatacatatatatgtataatatatatgtatacttatatacatatatatgtatacttatatacatatatatgtatacttatatacatatataagtatacttatatacatatatatgtatacttatatacatatatatgtataatatatatgtatacttacatacatacgtatataataatatatatatattttttcactgaattgtaaatagtgattacctctgagttgaatgatcaaattatggacaatatactgcaatttattttcctttgtgcttttctgtgtattttgatttttctgtgtgtatttttttataatatgagtatatactaagtattagattaataaggattttaaatattctatttagctcttaaaaatcaaaatgaagggcttttatgtcccaaaatgaattaatcatcctagtctcctaagttcatgttttctttaatattttatcttggaacccgcaagccagaaagctgaggattatgctcatctccacctctgcctgggcacctcaagatctcctaagacccacattccattcgtttcacttccattcacatctgacatccttctcaccacacccttcgtatataataagctgattgtggttggaaagatcccttagctgatgctgtccgttccaataactgcttagatactttctgccttcctttcacaccaagggtggacctaccagctcagcatttcacttgcggcttcccattaccagctgtgtcatggtaatctgtcaagcctcagagccacagaagtttagaatgaaaaagaacatatggattatcttgctctgccgctaaattatctcaaaagaagaaactggaggtcagagatgcaaaatgactccccaacctcacagctaattcctgtctggagcccagtctcccctagtcttcaccacctcaaacctcaaattcattcatttcttagtagaagccaggcattctcgcctggcctcttgcagccctaacaacaaaggggtttgcacaataaaaacactggtaagatttggggtgcaaactctggcttttagctgaacttgctacgtggctgcagctgagccataaagtcatctggtcttggctgccctcttaactcaaatttgcaaagtaaagtagtaaagtataacagaagcttcctttgatttaaggctgctgggggagagagccttgagttaggaacagagatccgagttgtttatttaaataaatgaatggaactttaacagaacagctaataaacaaatccacaaggtcatgccaggctccctgggacccgaggtgttgggtctgaaatccagccaaagagaccaacacatcactttggcctcccagagttctccagtggtctccagggtcccagtggggccttgggtttggaatggcttctgagaagccaggcctggggctggggggtggggggtgctggcagtaagggggagctttattttacctaccctctagaaggtctagaaggaggcgcagcccagggacactgccagctgggaaaaccagtgccccacagcactgaggtccacccagctcctcttctcagaccacagatttgaattttaatgttttaaccctttagatatgatttataatttaggtttgcatattgacgtcctattggcaagctgaccttagaatgactcccggccctatcaaggaactttctccttgaaacccctatccccacttcccttctatgtagaagcatcttccttcttttctctccctcttatatttcaagatcctgtccagaagcaacgtccttcatgttgcctttgcttaacaacccaaagtgaactttgtctcttctgcttccctgaaggatgtggttggcccttggaactctggctgccattgtaatgagctttctcatatggtagagatctagacacaattttcttttccctgtatgctttgccctgaataaaagtaaaaagatataatcaaacaaagaaaacctaagcatgtggcagagagcagttgtcatcaaagaggccatgagggaagtagagatgtgttaccactttctgggacattatggtctgtctacactcacaaaatgagtgctagatgttgctttgttttgtttttggcaagataggtgcatttcagggctttcttccactgcttctgcctttcaaagcaagctggggagccctggctgacgtaacaactgcttatgactttcccttgcggtattttttactaaagcagttttactaataggctgtttacagtcattttcctttcacagctggccccggagtgaaatgaaaacaaaaaaaatgatacccaggggtttatcaatttttcttccttataaactgttagtgcgtctcagcaggagaagttcacaatccccgatttataactgtgttcagcaggatttgtctgcccagattgactcacaacatggaaaaagcccagatccctccaggggagctggtgccccttgctgagcctggccgcctcactgctgggtctgtgatgtggccagggggttgtggctcgcggggcatcagagctgtgcagggagaaatggagacaccgtcccaaagtggctttatgaagattccaaaagggtagaggggctttattcctcctgcatatatttacttaagtttctttttaatatttccaagggtgggggggggggggaaaccatgatcatgacatttaacatgcaagaagtaggggacagcccaacagcagtacctaaaatcccaagctagaataagacagtgaagggacagagacacagagaagcaggaaggaaaaaagtaagaggcaacaactcagatttcttcaccgatcagacggggaagaaagacatagccaaacctcatttgggtggcacgtgggagaagctacccagataagccattgcttttaggttatggtgagtgaaaggaaggagtttgtgcaaaggatcatttcatcctttccatatacacttggttaaataatcaagcccatagttgtgattccctttaagggtacttttttcattcatttaatgttttattcacttactcattcatccgaactgagaatcaactgaaagctggataagtcataaaacaatctcagcttcatgcagctttcaatctagtggtagacacggacttaaataaattattctactaatgatctgtataatacaaggaatcaaatctagactcagtttacctagcctaagtaagaagaacatccctgctgaggttccatagaatctgaaacctaaatgatgaaacaagccagaaaaaagagaaagacaaatgatacatggaaaaatgaaaatgtgaaaaattctaagcttgaaagaagcttgttgagtttgaaaaacagtgaaaaggccaaaacaatcagaggatataagcaaaggaaaaggtggcttcggagttagcaaaggatggaccatcagtgccctgcagtccacactgaggctaaggaagattctcctaaaaatgagagaagctattggaaagttttaaaggatggcaagacatgatcagctatgcatattaggaagattattctacctgatctatggaaaatgaatcaaagagaaaaaaaacgaccagtagtttagtatggccttctaggtaaggaaatggtggtttattttaggatcccagcttgggctaaggtgatcgcaatggagaggaagaggatggagattaaatacggtttttttttttttttttttgggggggaaatagaattgacaagacttgctgatagaagggatacgctttttctggcatgagtaaccaagtagatgaaggtgttacttcctctaatcagcacctatttcccacttccccaaactcacttggagctgacaagttacatgaagcttctgtctctccagtctcaccttcaacccaccattcacctctctatgattacccctaatcccagcctctccacttatcagctctgtgtctttggcaagatatttagtcccatgagcttgagagtcctcatctgtaaaatgtgggacagtcaagagaattaaatgagatcatatctgcggagctcctggaacacagaaggcattcaataaatgcgtgtttatttcctccctgcttctccttcttagcgctggccttcgagatcttgaatttggtacttcacgttcccaaatataaccttttagctggctccttctctcattctccatccgacacaaatttgttcttccacctcatccagataaatattcacttattaactccatccatctagctaattccattttccatgtctgttctactcaaatttcaatacttgtttttgacctcacggttatttacaacctgtgtgtacaatacctccctgttccctggtgggagacacagtaaagtggctgaagttggggacacaggttgcgtgcttaggaaatcaaaagatgttgtgggtcaaaggcagggcaggcaaggatgctgtctggtgctggagtcaattcagaagctaaaaaccagagccaggcaagctgttaggtgaatggaggcagacacaacttgccagagataaggggtcttgaaaggaaagcaaaggtctgcctcagacaggaaacctctcattccctcctctgtcactgttgcggctggatccaaccatggccttcctcctcacccttgttaactgcattcccaggatcatggactcattcctgtagcctctgctgacattagcacaccagacagcaggattcatgcaggcatgtggtctggcttctaatagagacatccaacctgcacttgctcgcctctgagagtgctaatgtctcctctccttcccagcattaaaaatattttaaattaagcaggaagttgaaactagtttatctctcagagtccttccagttcaaggagtttttgtgttcaacagaatgagcttgattttacttcatttgaaatatatttattgaataaatagtagttgcacatggtaaaataaaaacagcctaaaagagtgtatgctaaacaccttcacttaccttcctcatatgcaattgctgtaacaagttgtgtgtgtgtgtgtgtgtgtgtgtgtatgagtgtgaatgtttccagaaatattttaaccatttaaaagcataagtggctgagcacctatccccttcacttgtatcttcaatcatgaagcccccactgccttggtctgattgattgtgtccccacaaaattcatatgttaaaatcctaaccatcacagttataatatcaggaagtgacgccttttggaaggcgtttaggtcataagtgcagagttttcatgaatgagatcagtgcccttataaaagaggctcaagagagatttctcattccttccaccatgtaaggctataatgagaagatgtccatctttgaagaatgggccatcactagacactgagtttgctggtaccttgatcttggactttctagtctccagaactgttgtttataagcatccagtttatggaattgtgttgaagtagcctaaacagactaagacacccactctttcccaacccccatttatagaataaatctattgttcttttgtgttctcaacaggctaagtatagacttctattatagtttctataatgcttttctgcctctgtcttacttcccatgtgaaaaaatatgaacaaaataataaaagtaacccaaagaaagtaaaaggcagaaattataaggatagcagcaagaattaatgatatagaaaacagccccccgaaaatattctcactaatctgcaaaaccgaagtctgctccttgtaaagaccaatggactagataagtctttggtaggtctgactaaggggaaaagaaagacaaaagtaagacttactttacttaaaaaaaaaaaaaaaaagtggtattatgtcagctatgcaggaggcttatgaattgtgaggctatcttgcaacactttatgccaacaaatttcaaactctaggtgaaataaatgacttccttcctaggaaaacagaaattattcaagaaaaagtataaatcctgaatatactaataaccatacaaaaaaccaagaaagtaatcacagatttgccactaaagactctggacccatgagtctgttcaaggaacagacaatttcatgtcatatagcatattctacagcataacaaaagatagaaaatttctccactaaatctataaaaatagtacattttaaaaagtaggctagtatcacatacatagactgaaaagttttaaatgaattcacatatcaaatccaaccatttaaaaatagaatgtcaacatggcttaccttatttatcattgggcaatccactaataaaattcaccacataggctgattaaaagagaaaaaatatatgctaaacttaaaagatgccaaagagaacatttaataaaattcatcatgctttctcattaaaaaaatactttaataatatcattttatcacaataaaatatcttcatcttctaaagcatagttaccaaatcctacagcaaacatcttgcttaatggtgaaatatcagaggaagtcttactacttaggaacaagacaaggatttccattatcattgccacgagagatattagccaatgtaataagacaaaaaaaaaaaaaaagagttttaactattgcaaaggatggcctcaactgctcaactgtctaatttttacaattctctaccaaggaaatctaagagaagtcattttaaaaaaaactattataataaataagataactcaacaaaatggccaaatagaaaaacaacataccaaaaccattttttgtattcaggaaaataaaaaatatagagaatagtaataaaacaagtatgtacatatctttacaatgtgcaagatgtagctctaagtgttttacacaggttaaccaattttgtcctcacaaccaccctaggagtaaagtatcattattgccaccatgttcagaggggaggaactaaaccacagcaaagtaaagcaacgtgcctgggatcatgcagcaaataagtggcagagccatggtatgaactgagggagtctggtcacaggtttcatgctacggaaatgaatgcagaatgaagaccttattataagttttctgaaaaatacaagaagaatttctgtcagattagcaaaaatgtttcaaattatataaaatcaagtgatgtgatcattgaaggattcagagtctcctctatgctgttacttgaactataaacagatgaaactttcctgaaggcaatttatagtatctgtcaaaactgaaaataaattagaaattttataccctatatatctttgtgtataagattacttattaaaaaattgttgaaaatagcacaaaatagaccacaagaaaagtccatcaatagggtagtcttgaaatagagcattctatatctttgctataaaatattatggagctttgaaaaggaatatgaaatggaaaaatcaccaagacatattttcagatgaacaaagcaaactataggacaatatgcatactagggccctaactgtgttttttaaagatgtaatatatacccgtatgtgtaactgtgcacagcaaagggactgagaaccatgatccaacctgttaacagcaatgactactgggaaaatgattgagatagtgacagagataaatgggggctgtcagggttcttgttaaacaattttatattgtttgaatctcacataaaagggatatatttataaatttaaatgtttgttattaaaaagaaaaaaaagtagaaaatgcaatattagtttcaaaaccagagtaaaaaaaatgttggctgggtgggggcagaggggattcctttgactaaagaatgcatgcaagcacaaatgcacattttcctatctttttgtaaaaggagtgagtcttctgtatcacgagtcactaatggaaaaaaaaaaaggattgagtgtcttggagataagatagtttggggctgggcatggtggctaatacctataatgccagaactttgggaggacgaggcaggcggatcacaaggtcaggagatcaagaccatcctggccaacatggtgaaaccctgtctctacaaaaaatacaaaaattagctgggtgtgcctgttattctagctactcgggaggctgagggaggagaatcacttgaaccagggagtcgtaggttgcagtgagctgagattgtgccactgcactccagcctggcgacagagcaagactctgtctcaaaaaaaaaaaaaaaaaagaaaaaagataatttggaaatgttcatttgtttgaccacttctaccaatacttaataaaataaggggaacaaattctgtcctaccttatcctcacacagaagaatgtgagaggccctggaaagagaattaactggcccgtcttataagaatggggaacagagtccgcttcatattagtcagcaaaatgaataagaattgtagacttgtgaatgaggagccctctagccttcctctagagaagtgattcaaataaaaatttaaaaaagaagaaagagaagtgattcaatgctctgcctcagaagacattggaaagctgaaagtagaagactatgtgtttgtgttggcagggagagactggcattccaggagactggtcattttaaatatagcatcactcatagcttgcagaaaatgctatctctgcttccaggcttcagcaacacagtgccatgtcaggtcaggggacaagagttagtatttaggaggaggcagtggtgacagtgaaaaaagcagaagacaaagaaatgagtgcatagcttgatcgttagtggtgtgggctctgggaacatttgactggtgcttaatcctggctccaaaacccaaaagttctgtgaccttgggcaaatcgtataatttttacccagtttacttacttgtaaaatggtgataaaacaatagtaattatttttgtatagtttttttgtgagtaatagatgaaataatcttgtaaaaccgttagcagaatgtctggaacatagtaaatattcaacatatattaggtattattaataataacactatgtagaaaaataggaagaataaagaagacctactatttgataacaacagggtgattgtagttgataattacttaattgtgcattaaaaaataactaaaagagtataatttgattatttgtaacaaacggtaaattcttaaaaggatggataccccattctccatgatgtgattattacacattgcatgcctatatcaaaacatctcatgtgccccctaaatatataaacctactgtatatccataacaactaaaaataaaattttaaaataataatatgaccactttggctgggcacggtcgctcacgcttgtaatcccagaactttgggaggctgaggcaggtggatcacaaggtcaggagatcgagatcatcctggccaacatggtgaaaccctgtcactactaaaaatacaaaaattagctgggtgtggtggcacgcaactgtagtcccagctacttggggaggctgaggcaccagagaattgcttgaacctaggaggcagaggttgcagtgagctgagatggtgccactgtactccagcctggcaacagagcaagactccgtctcaaaaaaaaaaaaaaaaaaaaaaaaagaatatgaccactttaaggactagaaatgacaccacttttggaatttggtctctaacttttggtcatttttgcttatttgtagggcatattccagtgctcctggagaagtacatgggtattaggggtgacctggaagatgcttgccagctgggcacaacctcaagctgtggtgtccagtccagtagccactagtggcaggggttgctgagaaactgatctgtggctggtccaatgtgagatgtgctgttggcatcaaatacgctctggatagtgaaggcgtcacatgaaagaaaagactgtaaaacatctcaacaattttcatattatttacatgtttaaatgataatatgttagatacattgtgccaaatagattactaaaattacttttgtctgcctcattttaaattgtttaagtggctaccagaaagtgtttaattatgttttcattggacagcactgggctgatgccctgtcaaatcctctaggtcttgttatagcctgtcctgctgtacctatatttcctattaaatgcatcttcagcatttttgaaacatttttgtatacatttccttacgtttctggaaaggtaggtgagaagacattattttctgcattacaaagatagagaaactgaaaattaatgtgattcatccaaagacattctccaagtaacacatacccatgtggaaaaaaaattaattagaacagaaggcctcatcatagaaagtagcagtcttcctctacctccctgtccccttccttggaggaactttatacatgtatgcatacttttttttgtagggctattggttttctcagtattacccacacagctcctgttgactctgaacattttatttcaagatattttatggtataacacctgccttcaccagaacaactcgtagtccatcaaagtggtggcctcagttatctgagcatagtctccagcttataacaagaacttaggattattttcagaataaaagtggaataattactgataaagtaacaaatattcaacaacaggtttctttttctatagtgagatcttttgtgggccccatagctgccctaaggtttacagcacagggtaatagaagtacgaatgtccctgttagaatcaggattttcccaactttttgaaccagggattctttttgggaaaaaaaaaatatggcctttctaaagtccagcatcaatatatcaaaggtaaaaagagccaaagatcatatatagcacctataatatgaactacaggaaagattaacttgggagtggacaggctttttctgtaaagagctagatagtaagtgttttaggttttgtgggccaaacagtacccattgcaactactcaactctactgttgttgcacaaacatgggcatagataatagataaatgaatgggcatggctgtgttccaataaaactttatttatcaaaacagtcagagggccagttttgtccaacaacagcagtttgcaaacccttggatgaaagttttcagtgaaaccatgcccaaatgacaaaatacctataaaatttgcacaagaaaaggaaaggcgtattaacattcagtggcgttcttcataaactccagtaacacaggaatatcatggaagaaggagtgcaggataaatcaagattgagagaagatgcctggagttttatgacgcagtgttgatagtgtgatggcagcgttggtgaggagcatcatggtaggattgacttgagatatttggtggagaagggagacaaagggtaaccagaggaggctgacaatcctgatgtaagtttttttttgccctccaccatggagaagacgtgtatatgtttaacaggaatgattaaaccatcagggaagctagagaccaaggtatcgtaaagaggttgaaaggtttgcctgcacaaggagaagtatcattttttattttaagagaggaatgagagttgagttgtccccagtccctcagttacaatttgtttccatttttaatgctttcatggcacattgatcttcaccatctccctcctatatcaccttcagccttgcatcttcatctgtatgttggcctttcattcttgagggaaagggaccatgtcaatcatctttccatctttgtatttggtgacctccaaagagaaggtgctcaatatcatttccacttgaattacagatgagaaacaaggaagcatcacattctcgactgtattacagtatcaggcctatagggctgctttattcccagggcttatctttaagttaaattaaaaggcatcttaacttaagaggtcacctggcaagatgccggcctaccaagtgaccagatgagcatgaaatagagcagacagcagttatccgttctgagcatctgcagtcaaagtataaatggagatggccgattttcctgaatagagctgggtttgtgttcaagataaatggccaggcaaggtgaggtttgatgatgaatgaattgggattagcattgcaagtgtgatggagaaaagctttctattcccagcacttaaaatcattactcttggtgaacatctgccataattaatcaattctctcctgtgtttgctcagggaacactgtttggacctcagtttgagcactgatttgagtctaccttcttgatccatagatgcataaagtctgtctttccactggcctgtgatccctttgagaacagggattattttaattaatgtttgtatcacagtggtaactccaaaatttccctacagcaccacacacacacacgcacacacacacacacacatccgtgtgtgtgctatatagaaatacatacatttccatatagaatatagaaatgcgtatatttccatatagaatatagaaatgcgtattttccatatagaatatagaaatgcgtattttccatatagaatatagaaatgcgtattttccatatagaatatagaaatgcgtattttccatatagaatatagaaatgcgtatatttccatatagaatatagaaatgcgtatatttccatatagaatatagaaatgcgtatatttccatatagaatatagaaatgcgtatatttccatatagaatatagaaatgcgtatatttctatatagaatatagaaatacatataaccagtgctatatagaaatacacacacacacttatatagaagtacatatatttctacatagaatatagaaatacatatatttctacatagaatatagaaatacatatatttctacatagaatatagaaatacatatatttctacatagaatatagaaatacatatatttctacatagaatatagaaatacatatatttctacatagaatatagaaatacatatatttctacatagaatatagaaatacatatatttctacatagaatatagaaatacatatatttctacagagaatatagaaatacatatatttctacagagaatatagaaatacatatatttctacatagaatatagaaatacatatatttctacagagaatatagaaatacatatatttctacagagaatatagaaatacatatatttctacagagaatatagaaatacatatatttctacatagaatatagaaatacatatatttctacagagaatatagaaatacatatatttctacatagaatatagaaatacatatatttctacagagaatatagaaatacatatatttctacatagaatatagaaatacatatatttctacatagaatatagaaatacatatatttctacatagaatatagaaaaacatatatttctacatagaatatagaaatacatatatttctacatagaatatagaaatacatatatttctacatagaatatagaaatacatatatttctatatagaatatagaaataaatataaccagtgctatatagaaatacacacacacgtgtgtgtgtgtatttctatatagcactggtttggggaggggcaatctatggtttggggagtggccaggtgttataagaaaagtgtctggcctgtgtttgcgttatagactcatttttacttagattttatgttttttttaggtagctttaggtggtagatgatggaagagtagtaaatctctggtgaggcatcagtgcaccagaagagtccctaaaatgccttgtacaaaattggtctaattgagtatgttgacattttgcttgaatttctttaaaatgttaggggaatggaggaaatgctcatccaacccaactttatcttgtgaagacttgttgtgcttacaagacatattttaatcagttctgacaaccattcccttctaaggatggtggattctatttacaagggcctgcctttaatgttgctgagggtgggtatgtagtttaggattgagtgtttgggcatggctgagtcactttgcacaataaaaggaagaggcatgatggtgcatgctaaggactgaattcatgttgaagctctaacccccagtgtgactgcatttggagatggggtgactaaggaggtaattaagtttaaatagatcataagggtggggccctgatctgataggattagcatcctctaagaatacaaactagtgaccattgatgggcagaaagaaagtgtgcacatatcccctaaaaaatatatacgcacacacacacacatacacacacatctatcctctggtgacgtgattgaaaatggatttttaagggcagaaatatataaagaacatttaagtctatttctgggctgggcacagtggctcacgcctataatccagcactttgggaggctgaggcaggtggatcacctgaggtcgagagttcaagaccagcctggccaacatggtgaaacctcgtctccactaaaaatacaaaaattagccaggtatggtgacgggcggctgtagtcccagctacttgggaggctgaggcaggagaattgcttgaaaccgggaggcggaggttgcagtgagccaagattgcaccactgcactccagcctgggcgacagaagactccatctcaaaaaaaaaaaaaaatctatttctggcaagatgtgcaatgtaatccacctgctgcacacatagtgaccagaagcacaaagatttttgctcctagtgtgaaacggcagagttgatgcagagaagtaacaactcagccaggaactacatttcccaggctccttgcatctaggtggctctgtatggctagttattgcaaatagactctgggtgaagcaaggtatgactttgcagaatgaagatatcaagtctcagatgcttgatcctttaggtcagaggtaggcaaacattttaccaagggctaataatacatatttgtagactttccaggccatacagtctctattgcaagtaatactcaactttgccttttagcaaaaaatcatccatagaaaatgtataaaccggccgggcacagtggctcatgcctgtaatcccagcactttgggaggccgaggcgggtggatcacctgaggtcaggagtttgagaccagcctggacaacatggtgaaaccccatctctactaaaaatacaaaaaatatgaaccgggcgtggtggcaggcacctgtattcccagctactcaggaggctgaggcaggggaactgcttgaaccagggaggtggaggttgcagtgagccgagatcacgccactgcactccagcctaggcaacagagtgagaccctgtctaaaaaaagtacaaacaaataagcatggctgcgtttcaaaaaaaactacttacagatattgaaatttgaatttcatttagttttcacatgtcacaaactattcttccttttattttttcaaccaccgaaaaatatgaaaataactattagcccagaagctatacaactggcagtgggctgaatttggttgctgggcgttagtttgctgaccttgctctagttgctgtcttttctcacactctgtcacagtacctgacaccgaagatcttctggaggactctgaggacccaggacacagtgggctgacaagatggaaggagaatcacccaggtaagctgctcaagagaactgcccaagaaggaagatctttgagtgagcaagaaataaacctttatttttgtttagccactgagatttgggagttgttacaggaggtcatgttgcttatcctaataacccccctttgccatctcttgcctcagtgacagattcaattaattctatattgttcactaggctttgtggagcttaagaaggcccagaagggaagggcaaatacctgggctataataatttgtgttaattactttctatatcaaagtattcttgatatagttgagagtctttgggaatgagaagaccatactaaatcttgcctggactgcatccaaaggctttttcttctatttcaaacttatctccaatgaatatgtactaacacctcatttatccacacaattcccccatctccttgactacctgctgtatttctggcagtagttatttgaaattcattgcattttttttctctagtacatccctatctcttcctccataagtgagcagattgtatcattttctatgtatctatgatttgttttcccaagtcagttcctctattaatttgtcatcagtctcctcatttacttgaaacacctttgcatcactgtgaatgttttccccctttttccctctctcccttgcagagaaggaggctccctatcccctggacaagtggatttcattctgtctccctccccgcacaacctcaacagcacctttaacccctccacatctttgttgctgttgttgttgttgtttgttttgagaccaggtctcatcctgcacccaggctggagtgcagtggcacaatcatggctcactatagacttaacctcccaagcccaagctatcttctcaccttaccctcccgagtagctgagaccaccggcatgcgccaccatgcctgggtaatttttgtatggtttgtaaagatgaggtctctctatgttgcccaggctggtcttgaactcctgggctcaagcaatcctcccacctcagtctcctaaagtgttgagatgacaggcgtgagccactgcaccctgcctaacctttccacttctaattgattctttccttctgccttcaataattctatgatcattcctatctttaaagtggaaaaactctactaacttatcaaacctatgacctttcagagattaagatttttgacacaatgcttggtacacagccaccctttttcatgtactgctgttttattttgctgccagttatcagtcttacaccattgctgcagatcttgaggtcacagatgacctcttggctggcaaatcagtggtttttcctaactctttaagccatcagaactctgcagtccttgacgtctcgaaataccatgtaccttaggtctggggtagtccaacttattatgtacaacctcagagatcctgtatgaagttgctcattagccattgattccctgtatttacaggccaagaagaaatgctgtattagacatgaacttgagtgttgattcaggcaagaaagaagtctgtgtggattgctagggtcgtcagtcatccagcgtgcatatatgtattctttttttttttttttttttttttttttttttgagacggagtctcgctctgtcgcccaggctggagtgcagtggcgcgatctcggctcactgcaagctccgcctcctgggttcacgccattctcctgcctcagcctcccgagtagctgggactacaggcgcccgccaccacgcccggctaattttttgtatttttagtagagacggggtttcaccgtgttagccaggatggtctcgatctcctgacctcgtgatccacccgcctcggcctcccaaagcatatatgtattcttgtgaattaaagtgatgtagacatttagccacctctgtcaaggccaactgcttcagaaagtagaggataaaaatggttgagagcagcagaaattccagatataaggaaaacaacaaagtaacttatcaatataccgctatcatagtacttacatattatttgattaaatcaaatgaaataaccaatattcgacatttttggcccacaaaaacagcaattggtcatatggttcaatttattatagaaagtacctgttttttctcataggctgcatttaaagatctgaaacttactcatattttatttctagagcttagtatacagtggggtcaatgcatgttgaactgaatcagaattcagttcataatgtacaccagaaaatttgggttcaagtcagctctgccacaatggtccatgccaacttagataagtcaccttcatcggagccatcttttctcatctgcaaaataggggtttctgcactgtcttcctcaaatattttttgtaaggatcaaatagcattgtatatatggcagcattgtgtgatctctaaaaagctatatatctttacatagtttatatctaggattcactcattatagaaacttaaaaactaacattgaaatgagaataaactaccattgtggctagctatgttttcctatttcatggatgaataacaggatacttacaaggaacgtatctcagtttactcacacctgtgatgtagacctactcctggaacatggatctcctgcttacaccctttttctcttcgaattttccagaccattgacctattatagttgacccttgaacaatgcagggaataaggtcacccatccccagcacagttgaaaatccacctataacttttgactctcccaatacttagccacttgatagtctactgttgactggacaccttactgataacacaaacagttgattaacacatttttcatatgttatattatattatatactgtattcttacaataaattaagctagagtaaagaaaacattattaagaaaattgtgtggaaattatatttactattcattaaatggaaatttatcaacacgagtgtctcatccttgttgtcttcatgttgagtaggctgagaaggaggaggaagagaggggttggtcttgctgtttcagaggtggcagagtcagaagaggtggaggaggtggaaggggaggtaggagaattgcacttggtgtaactttcattgaaaaaagatctatgtataagtggaaatccgtgctgttctagagtcaactgtagttacacacacctttttcaggtagggcttttaaaaaactgcactagttttatctccaactgaaaacttttagaccctaaatagcttacaggtaatacttttggcattgaaatattccatcgtcagctctctaagtctaaggattcttccatttactacttagagctttgctcatgtcttccgcccaccaaagcacagatcagttccagtctccagtttgcaaaagatctcctggaccttttctgctgcctagtcaaaagctttttgactcagttccaaataatcctttcaccttcattttattaaaagtattttatcatattacaacctttcaaaaagacatgaactgcaacagggaaataaatagagctaatctattttatatcatcaaagtccttaaatgatgaagatatgaaatatccatttttctttctcttcctgttcatcattgtgcagaaagattattgaggctaattgaagcctgtttcatttttctgctattggatgtgggttttagctgaagtggaatgaaacatatcatatatgaagggagattacttttacaaattaaaccaatgtatcttactgagttctatttccagaaatgtgaccttattatacttgataattaaaaatgagagcaataaagacatgctagccaacatgccttctaaaaatgcctgctggatttgaattaagtttggtcttggccagtaaaatgtcacaaggtacccatcccctgtggggaactgtgatgaaaagctcctcattgcagcagttattcctggccactccagatgagatgccagcctccctgtgttcttagtaaataaaaggttttggggtattcttattggtgttattaaagaaggaaggggaagatacttaatatggctgcctccaagatgacagaaaaggagggagagagagagaaaggaaggaagacttgaaatcttcatttattttaaagagaaagaatgggttgaaaaacagacaagaaacctgaggccaaggatgtgggtgagctggtgcagggaaaagctgacttggcagaagaagtcaagtagaagagtgagaatatcatggattatctcatccaagggagggagacatcatgctacgaagttctaaggacagaaattgaacatttttagaacaccaggaaagaggctgggaagggcagagttgagaggataaagaaaaggactaaagtctttaaaagagaaaaaggttgttcaaatttgccgactaagctggacaatgccaaactcttaactccatcgtttcttctggaatggcttcccctcatagttaaaatcctgggaattataattatacatataaaaaaggggtgcattcaggacagcagaccttagactgctagtgtgcataccttaaagccaaggaggggcttagacagtgaaatgtaagaggaaagccctgtgtttccaagtcaagtctcccatctggagcccccgatgattaagagtctggaacatgttatctccagtcttcatttatagtttctcctggtaggggtagttaaaatgcctttactcctctctgtccagctggacttgatcccagccaaagtcaatttcaaatgctctagtgtctcagaaaacaatctgtattgagaatcccacatgccagcacctttcttatttcactctgcagtacaaaatgcattggtcaatttttttttattttattatttttattttttttagacagagtctcactctgtcgcccaggctggagtgcagtggtgcgatctcggctcactgcaacctccgcctcccgggtttaagcaattctcctgcctcagcctcctgagtagctgggattacaggcgcccaccactacacccagctaattttttctatttttagtagagacagggtttcagcctgttagccaggctggtctcgaactcctgaccttgtgatttgcctgccttggcctcccaaagtgctgggattacaggtgtgagccaccacgcctagccacattggtcatattttaaaacatcaaatgtccaaagatagtctgtgatcttgcagatggatgagatttcagatatcacctcattcatattcaaaccatccacaagatgtgctgcccttcatagtggacaacttatagaggtaggattcattattggtcaatttgcctacattcttttttttttttttttttttaatgagacagagtcttgctctgttgcccaggctggagtgcagtggcatgatctcggctcactgcaagttccacctcccaggttcatgtcattctccttcctcagcctcctgagtagctgggactacaggcacctgccaccacacccggctaattttttttttttttttgtatttttagtagagacagggtttcaccgtgttagccaggatggtctcgatctcctgacctcatgatccgcccgtctcagcctcccaaagtgctgggatagattgcctacattcttatcctgcttacaagctgtgtcagctcaagcaagttttaaaaattgtcgttcatctgtaaaatatgaatattaacagcacctacagcaatgtaacatcactggctattttctgtcatgtagaaagcagagagatgtagcccatagtgatcattctgaatctttacaggcattttacccctaccaggatcaccaagaagccttgttaaaacacatgttgctgactcccaccctctgtttctgggatagggcctggaaatcagcatttgtaacaagtttccaggtgtcattgatgctgttggtctggataccacactttgcgaaccactagtctataacaagaaagaagaataaaaccaacatattcaaaaatcaaagatagatgcatgatagaagaaaaggtaggaaggaaggaaggtaggaaggaaggaaggaaggaaggaaggaaggaaggaagggaagaaggaaagaagggagggagggaaggagggagggaaagagagaaagataacatattcggtcttccccagagacattcaatttcttcttgaggcttagctgcttctcttttggttttgggaactaccccaagatcattccattcaagtccctttcttgagctattataatttggtgtttttacaattcaaaatatcattaaagtgttcttgatgggcaatgcagtcccctacttgaaaagccaatttctcatacttcatttcaaacacccagaaagtatctatacccattccctgtataaacaagaagggtctaacctccagagtaagatgaagactttcaaacaaaggtaagaagactctccctccaggtagacatcatagctgagcacagctcagtgacaaccgagaagatgaatcgcagacttgaaaaatcagttaaaagcccacaggatttcctatgcagccaggatatgaggtgcttgttagcccaacccgcatttgcagtgccacactgtagtctgctatggtggaacaggcctgggctttgggagccagacagacttagatgtgagccccacctttgccatcaccagctgtgtggcctcagataagttactcagcatttccaagcttcagttaccgcatgtgttaaatgaattaataacagtgtccacttgacagaaattacacagggtgctttccacagcttaccagtcggtgggattaccaattgatcaatcccaaagattgataagctgtggaaagcaccatttataactcctgggccatttctgggaggtgaagataaatcatatcatcattgttaggacacagtgggaagaggaggccaaaaagatgaacgttaatgagaaatggttacgcagaatacagaacagtcacaggtgtctgtcaggcaacatggccagagggttgactggggctttttccatgacccctccccagctgcatcaaactctactacagggagacacaagtgcaggaccccagctctcattctaatttttttttctctttttgagatggagtctcactctgatacccaggctagagtgcagtggtgcaattttggctcatgcaaactctgcctcccgggttcaagcgattcttctgcctcagcctcccaagaagctgggactatagtcacgtgctatcatgctcggctaatttttctttttgtatttttagcagagacacggttttgccatgttggccaggctggtctcaaactcctgacctcaggtgatccacccgcctcagtatcccaaagtgctgggattacaggtgtgagccaccacactcggcatcattctaattcttaatctactgcctgaccctcattttttgtcagtttacttctttccactcagtaacttcaattcttggtcacagcacagagtaaccaaaactttccctaccagagcacaatcacaccatgtctggagaaagccctggtattcctgagttccccttgtgagggctccaaagcagatgcctccagagatgtctgatccaccagcctgctcaccagcgtggtgagtggagtagcagaggcctctcaccaggggtattcctgcttcctttcgccagtcctggccccatcacaggaaagccctctgcacctatgactgggcccctccagctgagacctaccaagtgtaatgctccggtaactgagctgatttttaaggaataaacttgccaggacattggcacccagatacatgctgtcctcttttaagtgggatctatgtgaggctgcgcagaaccagggatgtcatcttggtatagatgtctccaactctggaattctttgagccgtcaacactcacagcgtgtcttccctctacaatactgatattggtggcaaatcttcatttgctccaagtggatttgattttgaaaatagctaagagctatttaataccaagccttgagaagaagggtaatcaagcaattgaatagcagtttgggtaataaacaagtgtgacttggaggttgatttttctgagcatgggccataaaccgattctgagagtaatcagaaatgcaggtatacaagtgtttccacatgccctttcttcccaagtaaatgaggtgtaaactcatgaatgctgaggcctactgtgcaccagacactttccatatataatcttgttagaacctctcaagaattctatgatcaaagtttgcaaagaggaaacagatccccagagcaataacttttcagtctcacagaaataataaccggcagaggcagggtgagactttaagctacctgattcccaaatactcatgtgctaggacttactcaaaaggctttgcactcacccagagctggggacttgattcctgtcttggctgccatcttttgggtttcatcctctcttgctgtctgttctctgaacctcagcttcccacttggcaccctcctgctctttaaaacatgaagtcagtataactttgcctaataaagtaaaccttcaaaaagctctgataaaaataatattcacagtgttcaactggcaagatacccctacttttctcacaagtcaccccaaagcaacaagggaacaataaaaaaaaaaaaaacaagaaatatggtcacaaactctgtctttcatgtaaccaggaaatatcagtaacttaaagtaacagtacagttggttcttgttcatagcagctatggtctacaaagtcactgcaaacgctgagttaccaaatactgaaccactgttaggggagatacagagctgggctcctgcaaacttctggtcacgatatgctcatcaaccaatcaatacacaactttatgtgtagactttatgtaacatatagttggcccttcaacaacgtgggcttggactgcacagatctacttatatgcctattttcttccacctctgtcccacttgagacaacaagactaacccttcctcttttcctctttcccctcctccttatgatttttttttttttttttttttttttgagatggagtttcgctgttgttcactattgttggcgcgatctcggctcactgcaacctctgcctcccgggtttaagcaattctcctgcctcaacctccctagtagctgggattacaggcatgtgccaccacgcccagctaattttgtatttttagtagagacggggtttctcctgttagtcaggctggtcctgaactcgtgacctcaggttatctgctgccttggcctcccaaagtgctgggattacaggcatgagccactgcatccagccatgatgttcttaataacattttatttcctctagtttactttattgtaagaatacagtatataatacctataacatataaaatgtgtgttaattgacggtttatattatcactaaggcttccagtcaacagtaggctattagtagttaagttttggggaagtcaaaaagtatccatcaattttcgactgcacaaagggtgagtccccttcgtaaccgatttgttcaaggatcgactgtatattgttaattcattaacactgaactcatggccaacagcatgatacttcatgcctgaacaaacgttatctaaacacatgtatttttttctgtaaggcatatcacagtccgggagcggtggctcacgcctgtaatcccagcactttgggaggccaaagcgggtggatcacgaggtcaggagatcgagaccatcctggctaacagggtgaaaccccgtctctactaaaaatacaaaaattagccgggcatagtggcgggcgcctgtagtcccagctactcgggaggctgaggtaggagaatggcgtgaacccgggaggcggagcttgcagtgagccgagatcacgccactgcactccagcctgggcgacatagcaagactccgtctcaaaataaaaaagaaaaaaagaaacattagacagtgcttcagcactatgtttggtggccattttaaatggcaaaatcaccaattgatatggtttggctctgtgtccccacccaaatctcatctcaaattgtagtcccctaatcctcatgtgtcaaggagggtacctggtgggagatgattggatcataggggccgtttcccacatgctgctctcatcatagtgagttctcgtgagatctgatgtttttataagtttctgacagttcctccttcacattctctctctcctgctgccttgtgaagaaggtgcctgcctccccttcgccttctgccatgatggtaagctttctgaggcctccccggccatgtggaactgagtcaatgaaacctcttttgtttataaattacccagtctggggtattctttatagcagtgcgaaaatggactcatacatcaaccaaaagctcaaaaatgtgaaaaatgtggcattaaataaaccacattgcttacagtctgaaagcagaaacaagaaggcaaaacgttgagatacaagggctcacagaagataagtgagctgatagaaggaaataaaacataagttggaagcttaggaaaaataaaagataaaaaaatcttaaaggtcacattagaagcagcatatagaaggataaacactgctgtgaacatataaagaaatatagagaacaaaaatgaggaaagcaaagaaaattaaatggaataatcaaaatttgaacatggaaaagacaacaacagagaagaaagacacgcatgatacaatatataacataaaataattgatatctccaaaaacatgaactaccagaggatacatgtcaactaactggagataaatgggaaaaaaaaatggcaaaaggacaatggaattgtaggataaaaacaaaagtggttagtggttcagtgtaaaatgaaaatattagaacccccaaaaatatagaaataaatccctaacaaaagttatgcatctgtggggaggaagaaaaagttagcatttaaatatgatagatcaagtaattgagctataaatgtacttaacaattataagttaaacaatagaaaaaaataaagtcaactaaaattgagtggtagaagttaagggcaaaacataaagaaggtgtcataggccaatttgttgttatctgtagatattacaatgtttacatagatatgtaaatgtcaaatacaaatacctaaatgaaatacgcatcttaatgtttaaaacagtaactcttaaactaaaataaaaattttccaaattagtaaagcagacacatgcacacacacacacacacaaaactgcacacactaaaagcagaaaaattcaacccagaaaggttaaaatatagagaagggcaaataaaattcaaagaaggaactgctcataatcttaacagataaaattatattccaggcaaaaagacttcagtgaatcaaagcagaaccctttacaataatataggttcaatttacaatgaagatctaatagttattgataattgtgtaccaaataatagcattattattcatacaggaaatgaacaggaaatcactagataagtagacagacatcataatagaagactttatttcacctctccaaatccataaaagagaaactaaacaaaaaataaaaataaaaaaggataaagaaactcaaggaacataataatatggacaaaactgatatatagttacctctctaccttagagacagaggtagaggtatcttccttgtaagtacttatgaatcattgggaaaaatctgatcatgaggtcagaaagtaaaactcagtaaattcccacaagagaaaatagtttagaaatctctctgatcacagtgaaataaaactaaaaggcaattacaaaactaggggtaaaaaaatactcaaccatctggaaatgttaaaacatgtttttaaatgttgagttaattacaaagaactagaaaaataaagataagaaactactatataccagaacatgcaggatacagctaaagcagaactcagagaaacatctttaactatattaatgaactaaaaaaaagaaaaataaataaatattatcaacctggcatcttataactcataaaataagccaaaatcagccaaccagtcaaaagaataaggaaaacagaaaaatccctgcctccactaaaataaattttacattaatcaaagatacaaatattaaaaagaaataattaaaaattgctatttctgttttttatttctatttttatttttttgagatggagtctcgctctgtcgtccaggctggagtgcagtggagcaatctcagctcactgcaagctccaccttccgggttcacgccattctcctgcctcagcctcccgagtagctgggactacaggtgccaaaaattgctgtttttgatgtaagaaagagcattccataaaaggaaaagccgaaacaccacaccactgagaatatatagtaaaatttctacattaaaaaaaatccataaaaacaaagaaaagttaagaggaaaaatatgcttcctctggcaagaaataataatttattaatatacaaaaagcccccaaactcaacaggaaaagaagacaaagagcataagagaaaaatgggcaaagattatgaatagatattttagaaaaggagagacaaatggctttaaaactttgaaaagatgctcagctttactcatacttagaaaaatcaaaataaaattccaattttttaaactattaaatggtcatagagcaaatattggataatccactgtcttgcaaaaacatagggagaaaggtattcacattgctgagagtgaaaactgtgctattgacagcaagtgggcaataactcaaaaaccaaagtacatctgcctttgattccaaaattctacctctagaaatgtagccgtaaaatacactcaagcacttgttgaaataacacacacgcaagtgttttagagcattgtttacagtagcaaaagaattaaaacaacttcaatatttatcagtaggatgggagctaaatgttttgaggtagtgatacaatggatacaatatggttttgttagtttgtttgtttttgagacggagtctcactctgtggcccaggctggagtgcagtgacacgatctcggttcactgcaacctctgcctcccgggttcaagccattctcctgcctcagcttcccgagtggttgggattacaggcacccaccaccacgcctggctaatttttgtatttttagtagagacggggtttcaccatgttggccaggctggtctcgaactcctgacctcaggtgatccgcctgcctcggcttcccaaagtgctgggattacaggcttgagccaccgcgcccgatccacaatgtgtttttaaaaggaaacagctctgaatatactaataaggaaccaacttgacggtttacaattgaaagtaaaaagcgaagtgcaaaagaaaaaaaaaaataggtctcatatactactgtctatgcccaccgaaacaatctatgttgatactgatgtacctctacacagatatatttgtgtaggaaggaaactgatagcagtccgtatctgggcagggaataagggtggccggctgacgggcagtgaggaggaggagtgatctaaggttcaccatatgctatttttcagagtttgtattttgaatctgtgagtgcattacctatttaaaatatgtattttaactttaagacagtatgtacggggagtggccgggaagcgtggagtttcgttggcttcccaccaaccatactgctcagctgggcgtctctgtgtggaacacagtgagaggtgggacacagagatgaccagctgagcagtcgagctggtgggaagcacaggaggacgtgctaagaattgtgaggcatcctccttgcctctccttgtgggtacttccctggcctcagctccagtctcctccctacactgcgacctcttctactgtacatagcccaagttcgctgtccgctcagcacccaacccacagtcctctgtcgcagaattcaacttctagtggcaaatgggttgattagttatagcctagtctataaattggtttcccctaaatccaagctccactctttttcaacgggtagccaggaggatgagataacacaaatataaacccattccctgtaatatctccagcaggggctttagtgggaggtaacttacaaacaggaagaaatgtgaggaggacggggcagtgataggcgagtttagtataaaactggtgggagagggcacacttttgaaatcacacatttgtgtttacattcctgctctgcttcttatcaaccacgtgaccttgagctaacaacagcctccacctctcttgcatggtttttgtggggattgttgatgagatagtttaaaatggcgggcacatcgtaagtgtttgataagtggtaggtgttgctatgagcaaattgaaatgccacaagatttcatttatatgtggaatataaaaaaatagagagtagaatggtggttagcagaggctgggggtcaggatggatggggtaaggggagatgtaagtcaaagcatatgaactttcagtgagccaggaggactaaattctagcgatctattgcacgacatggggactataattaataataatgtattatgtatttcaaaattgctaaaataatgaattttagatgttctccccataaggaaatgaaaagaatatatgtgaggtaacagatttgttaatttgcctgatttaatcattacacagtgtatgcctgtatgaaaacatcatgttgtaccccataaatatatacaatcattatttgttaattaaaagaaaagtacatcttaaaaaaattattttctaagagttcaataaggcacaggtaagccaagcttttaaaaatcctttaaaaagaggcttggggccaggcgcggtggctcacccctgcaatcctagcactttgggaggccgaggggggcagattgcctgagctcaggagtttgagaccagcctgggcaacacagtgaaaccccatctctactaaaatacaaaagaaattagccaggtgtggtagtgcgcacctgtagtcccagctacttgggaggctgaggcaggggaattgcttgaacccgggaggcagaggttgcagtgagccgagacggtgccattgcactccagcctgggcaacagagcaagactctgtctctacagaaaaaaaaaaaggctttgagaagatggattatgcactgcctgagagtgatagtttcttaggacacacgacgaagcccacacaggaaagaagaggtgaagaagccaagactccctgtcattctgcatgtatgggacccactcatgtttcctttagacttagttctagagtctggagaggcctgaacaggaaggcaggaaaagtaactctgtctctgtggtccctgcctccttctcaagtgaatgcttgcaccaccaggctcttctgtgcaggacagtactgctgtctgcagcattccaagagatacggaaagacaaggggaaaagagagaagacttcatttatgggagttcctacgtgtgccttttatgtaatctctcttgatacaatactggcaggcagacttcaatgtggctattttatcaatgaggaaaccagtgcttagccaggtaatgacaggtaattagaaaagtatccagactatactctcccgatctggaaatctaaattctcttcactataccatgccttgtctttcacttgtacaagctcataggacaccaatcacagcaatctttttttttttttttttttttttttgagatggtgtcttgctctgtcgcccaggctggagtccagtggcgtgatctcggctcactgcaagctccggctcccggggttcatgccattctcctgtctcagcctcccaagtagttgggactacaggtgtgtgccaccacacccggctgatttttttgcatttttagtagagacggggtttcaccatgttagccaggatggtcttgatctcttgacctcatgatctgcccgcctcagcctcccaaagtgctgggattacaggcatgagccaccgcgcccggccagcaatcgtatctttgattctctcttgtgacattttattttcctatgattcacataataaggttcaacctacatttcagataactgaaatccaagcatctaggaatctttgactttgagacttcccttcagaatgttagagacagaaactatctgtgacatgaacccaaccaagtgaggaagtctacagaggctagaatatagaaatggacatgccagtggcagaaagaagtgtgatggtatgagttgatcaggtaacagtcccaaagaaacctctgtggggcagaggagtgagaagagggtttgcaatggttcaaggtcagtaatccaggtggtagaagagcactggaagggaggctgaaaccgcaagggaagtacagggataagtggatccccactatcgaatcagataagaaagtgagtgaatgagtgccttcaaaaattatgggttgggtgcagtggctcacacctgtaatcccagcactttgggaggctgaggcagatggatcacaaggtcaggagttcgagaccatcctggtcaacatggtgaaaccctgtctctactaaaaatacaaaaaattagctgggcgtggtggcgggcacctgtagtcccagctactcaggaggctgaggcaggagaatggtgtgaacccgggaggcagagcttgcagtgagccaagattgcgccactgcactccatccagcctgggtgagagagcaagactccatctcaaaaaaaaaaaaaaaaaaaaaaaaaattatgatgttgtcaaatgctgaaacagtggttgccagagacaaggggcattgcccaggattctccaggaaaacaaaaaacaaaacaaaacaaaactcactggagatatctgtatttatatctatacctagagatttattgtaaggaattggctcacatgattacagatgctgacaaatcctaagatctgcaaccagcaggctggagactcaggagagccaatggtatagttccagtccaaaggtctgcaaactcaggacccaggaagggccaacatgtctctgttcaaaggcagtcagataagagttatttcttatttgtagaaggatcagactttttgtcctatttgggccatcaaaggatcagataaggcctgcccatgttagggaagttaatctgctttactcagtctactgattcaaatatgaatatcatccaaaaccatccttctgggcacacctagaataatgtttgacccaatatctgggcaacccatggcccagttaagttgacacaaaaaattaatcatacacaagggtataggagtgaatatgaaatgaactcaggaaaataactaacgaatgtcactgagaatctggcttgagatgataaggaatggctagaggagagattaatgcagatcttaacagtatgaaatggcaaagccaccaaaggagaatttgcttggcatcattgatggctggggtgagaggagtgtgtaggtgaatactgggacaaacaatatacgggcctgtgtaaacttagagtagcatgacaggtgcttctacagccaatttggatttggaattaaagcaaaattgctttcactcatcttctgtccaaggaaaattatacatcattgttgagataatggtgttaggagaccagtgcaatctgtgcgaaagttccttaaaaagaagttctgctcttaaatgcaagtgtgtaatgcacacattcacaggatgtcataggacgtaggacccagtgtggttctcttgatatgatggtgcttattacccaccccaagaccaaaggcaagggtagtgccatcaagagacactgagtttccttcagacccagctgacctaggtcatttagggagttccatccagaggctgaagatataaattcagtagtaattcagcatagtgatgatactatataaaactgtggaacaaatgagaccacgtagggcagtggttctcattcctgagtgcatgtaaggatcatccatgatgatttcgaaaccagccacagccagagctccagtcccagggactctaattccccttgcctggaaattatcactgcatttagaaaccttctggatgacgctaatgagcaggtagagttgagaacagatgatccaggggagcaaagaggaacctggaccaacattgaagcactcaacattagacatcagtttgagaagtagaagctagaaaagacaaggaaagccagagataaaagtgatttgagaggaggccaggttaatggtatcaaatcctgccaagtgaatcagatgaggccagagaagtgacctaggcatttggcagtctgaaggtagtttgttaccttggcagtttccttgtggagtggtagggacagaaatcagcctagagtgagttgaggtggaaacagtcattatagcaacattcttgagttttgtactgaattgatgagtgtaaatgatgcagcagctgctataggatgtgagaatgggagctttttactgtgctgatgggagtgatccaatagaaaagagtaattttataacaaataagaaaagtataataaccatatcagtaacgtccctgcaaaagcaagaggagatggagtccagataataagcagcattgggccaggtgcagtggcttatgcctataatcccagcactttgggaggccgaggcgggcagatcatgaggtcaggagttcaagaccagcctggccaacatagtgaaacaccgtttccactaaagatacagaaaattagcagggcatggtggcatgtgcctgtaatcccagctcctcgggaggctgaggcaggagaattgcttgaacctgggaggcggaggttgcagtgagccgagatcatgccattacactccagcctgggcaaaagggtgagacttcgtctcaaaaaaaaaaaaagcagaaagagaatggggtccccatctgatgacttctacaaacatctatttaagtcaatggaattacaaaataaatattttgaagtctattttggtcaccccactgactatatcatagacatattttatgtcagtacatctatatctcaatcattcctttaaaattaccacataataggccaggtgtggtggctcacacctgtaatcccagcactttgggaggccgaggtgggtggatcacgaggtcaggagttcaagatcagcttggccatgatggtgaaaccccatctctactaaaaatacaaaaaattagccgggcgtggtggtgagtgcctgtaatcccagctactcgggaggctgaagcagagaatcgcttgaacccggaaggcggaggttgtagtgagccgagatcgcgccactgcactccagcctcggtgacagagcaaaactccgtctcaaaaaaaaaaattactacatagtatttatttgtataggttatcattggtttagttaatactgttggaatgggagcatatagatttttttccatcttttttacgataaatatattttacagatgtttttcttatttccattaagataaattcctaagtatgaaattcctataaaaatcatcctttattatattattaatggttcttcagaaccagtaggatatatagacatacacaagaagagatttgttgtggaaactggtttcatgtgattatggaagccaaaacctcccacaatatacttaactgtaagttgttggagaatcagcaaagccagcggtgtcattcaatctgaattcaaagacctaataataaagaagccagtcctgtaactaagtctgagtccaaagtcctgaaaaccaggggggctgctggtgtaactcttaggctctgaaggctggagaaccaggagcttcaatgtctgagggcaggagaagatagacatcccaattcaagaagagagagtgagtatgccctccctcagcatgtttgttctacttggggtcctcaacagattggatgatgcctccccacattggtgagggtggggcttctttactcacgccactgattcaaattctaatctcttctagaaacacctgcacagatacatccagaaatagtgtttaaccagctatctgggcatcccttaacccagtcaagtagacagataaaattaaccatcactattattaattagctttccctttgctagtatttttattacccctttaagcaaccagattctgcttatagaaagccacagatataatttccattttctttaaacttcctatgctaggcaaagaatatattattatatattagtatacatattatgatattacataacatataatatatagcctcttttaatatattgtggtctcacagattagttgaacttcatgtgaaattttatattaattatttaaagagctgcttttcatttttctaacaacccaacggtaagcaagaagctgtttggccaaccttgaaaaagctgcttctggaagttgaaaggaattgcagtttaaattcacaaggacgatctctcctctccttccacacataccctccacacacacataccttttatcttccttcctctgctcatatttgttaatctcattggcgaatttttaattctcaaaaactgaccctaagccctctgaagatacgatttgtgccaaaattggttcaaatgctcttgacttttctccacccaaaggcaattatcagttcttgacatggcactgaatccttgaattcttccccgacacttattacactggaagctactctgcagaaggacactggctgccacttcatttgaatcctttgctttatccagtatagaatcacaaggtgaccaactcttggtctaaaagactcagtagccaaggccaccacaagacccgacacccaattctaatgtcaaagaagaggtatcttttaaaaatacaaatatgatttgatccttcattgcttaaagccctttgctcttggaataaatacaggcctccgtagctggacccaaaagagccctcatgctctttgatcacatattcaccatgctacccctcagcctctgaaatccatttgcactggtcttatttcagtttcttgagcaagtcatgtacacttctatccccgcttgcaaggaactcttctaacatccttctttgcctcatccttcagatcttgatatacctcacctcttcagggaagcctcctttactccagataggttgaacacccctattatttgccttcatagtgccatgtgattctccattctaagccctcccctccattgaaatttcatatgtgtttctgtgctttttgattaatatctatctccctttccagagtaaaagtttcatgaaaaccagaatggtacttgcttccctcatcattacatacccatcatcaaacacagtgtgcaagaaaatgtttgttttcttgagtggctgaatgagagaattcaattggttgaatgagagaatgaatgagtggctaaaagtgaaagtcatggtctacaagaggtagagatgggtagctgacaaatggacctcatggtggtggtgtagggaaataggggaagcaggaagttgaaatcacctagtcaaacaccaccccactcttgttttagaaatgggtgtctcactctgtcacccaggctggagtgtactggcatgatcatagatcactgcagcctcaaattactgggcttaagtgatcctcccacctcagactcctgtgtagttggaccatgggcatatggcacgatgcctggcttattaaaaaaatatatattgttataagacaggatcttgttttattgtgcaggctggtcttgaactcctggcttcaagcaatcctcccatcttggagttcccaaagtgctgggatgacaggcatgaaccactgtgcccagcctccaagccttcttaacatggacgcatacaaagagttcagagaatcaatgactctactttaactgaatataacattttatgtatacatataccttgtgggaacaaagtctaccgaattcatcacaatttcaaatagaagctgggcactgtggtgcacacccgtagtcccagctactcaggaggctgaggcaggagaatttcttgaggccagaagtttgagactgcagtgagctctgatcgcagctgtgaatagccactattacactccagcctgggcaacatagcaaaatcctgtctcttaaaaaaaatttcaaatgggtcttgatcctccaaaagcatgaaaaaccactagtctaatccaatttctgaacaagaactagatacatggccagaggtgaaatcagtgctttatccattgcactttctttttttttttttttttttttttttttgagacaacgtctcgctctgttgcccaggctggagtgcagtggtgcgatctcggctcactgctgcgacctctgcctcccaggttcaagtgattctcctgcctcagcctcctgggtagttgggactacagatgcctaccaccatgcccagctaattttttgtatttttagtagaggcagggtttcaccatgttagccaggatggtctcgatctcctgaccttgtaatcttcccacctcagcctcccaaagtgctgtgattacaggcatgagccaccacatccggccatccattgctctttctatcaaataacaataatagtaataattcatatcaaaacatcttttagccagctcctgattctttgagattccataggcaaaattaactttttgatacccatgctggttaagcatccaataaagtgagagctggctagctgtccctcggcatccagcctcatggccccttcttgaatcctcactagcagatagctctgaaggtggcgtgcagcctggggtgtttcatctttcatttgcccctcattcctagctaatgaagcttcatgcccttgtcaggccttgtttctacaaggctggacaccttcttttaacaggacgtacttgaaaaacaagatatttccctttgtactagaaacaaatggtgattaatgtacttgttgtaattaatctgtggtgacagattagcggggtagcagcagttcttttgctgctctgggaaccttccttgataggacagctggtgagaggggacaccaaattcaatttgtttctcatttgcatacatatgacaaccatctgtgctaatagcactgcaatgtctccattaggcccagagctcgtgtgctggctctccctttctcccattaggcctgggagagggagagctcacagcacaaatatttgtagaggaaaaagggtgggcttgatggaacacaaccaattatgtcccctcctagcaaaggtcaaacatccaacatgagctaagatccttctcacccatgggagggtaatcttctttgaaaaacccctactcctttcatcagaaggtctctaccctctccatctcaaagacccagtcgaattattcacagcctattccctatggtccagtcactcaaaccagcttcactttggcagatatcttttcttttttttaaactgataccttcattcaaaaaatattcatggaatatcagtccactgatcatgccagtgtactccagcctgggtgacagagtgagacccccatctctagaaaaagagggggtggtgcttgactaggtgatttcaacctcctgcttcccctgtttccctacatcactaccatgaggtccattcctcaactacccatctctacctcttttaggctatgactctcagttttagccactcattcattctctcattcattcaacaaacattttcctgtacactgtctttgatgatggacatgtaatgctgagggaagcagatcccattctggttttcatgaaacattttactctggaaagtgggatggatattaatcaaagtagcacagtttcagtggagaggagggcttataagggagatcacacggcactattcgtgcaataaatattcatggaatagtgcctgaacttaggcactattccaggtggaggaggaacagcagttaacaagagagagaaggtttttgttttatgaagtttacatgatagtgatgcacgctgatgataaacaaataaacaagaaaaaattcatgtagtgtcatgtcctaagcagagattcaaaaaacagggtttcagatggtgtgaaataggtcatatgtgacgccacattagttttgatgctcagagatgtcctttctgaagaggcgacgtgcaagctgccatctgaatggcaaagaggatccagcctgtgaacaccaagggaacacacatttttccggagggagagaaccgctaaaataaaggcctctagagaaagtgagcttgacgtgttgagtaagaggaagatagacagcatgtctgaagggaggtgggagtgatacatctgcgctaacttgctagggcagctgcaacaaagaaccacaaactgggggcttaaaacaacagaaatgtattgtctcagagttccggagcctagaagtccaaatcaaggtgtccacagggccttgaaaactacagaggagaatccttccttgtcttttttagcttctggtgtttgttagcaattcttgatgctccctgtcttgttgatgcaccactccaatctttgcctctgtcatcacatgactgtcttctccctgtgtgtttctattttcttataatgacaccagtcataatggattaaccccctgaaccacatggggatttggaagccaggtaaggcatgcagatcatagtgtaaaaggaatgatgacatttaaaggtttattgcaatgaaatggcatgatccattttatatgtcggtatcatgtatagattgaatggggcagggcaagaggggaaggatgaaggtgaaccactgaggaagttcatctttggatctacgtgtcatggcagcctgaactaggaaagtgacagaagagatggcataaagaaggaggttttgagatatatttaaaaggtaggatccataaactttataataggtcagatataagtatttggaaaatgagaagaatcatgttcctatcctgaacaattggcaggatggtgcatacttgctggaagagggaatacttgggggaagggaacaagtttgaaagagaaaatcaaatggtccattttggacacattgagttacagacgtttaagggatagccacacagaaatataagatcacctgtttgagtacgtgagtctaaatgtcagaggaaatgcttgagattaagacagaaatatgagcattatcagtttaaagaggttatttaaagttcacggtgctggatgagatctctccttagggggatagaagatatagaaaaacaggacccaaccccaaaccccagggaactctgtgaccctcatctcttcttctgtccatgcttgtgctaggggtcctcactccccatggtaagtgctcgttcttattatgaacagctttgctctatgacacattgcatatggtggaaagacaaggcagacccctctctgtttcgtgcctcattatacacatattttatctcaatttccctttgtcttgcttttactccatgggggaagaggctatgttcggcatgtcttcatttccacagactagggattctcaagccctcatactattgatgttttgcactggatgattctttgttgttggagggctgtcctgtggactataagatgtttagcagcatccgtggcctccacacactagatgccagtagcaccccctagtcatggcaatttaaaaatgtctccagatactgccaaatgttttctgggaaggagaaggaggcaaaatggaccccagttgagagccattgccacagacatctcacagggctccatatacaggagagacactcagtaaatagctgccgttggcattggcagcaactatctcttggcacacagcttccttctgccttcccctgtgcactaaaggaaatgcattcttcattaaaaccttgtaaaatagccttggaatttctcattagtctctggccagacctctagattccagactccttcttcagagttgaagacaaatgtttgagggactagaatgaggtgtgagagggtgtcattcattcagccagtcaacaaatggcaaagttaaacaattgaattaagagagaccttccacagccaaagcctgctttgataagataggggagggaggttattacctaagaaaaattgctactccacattccagtgactttgcatcctaaagaaaaagccatctttagcacaacagatgtcctttttaaaattttatcagccagaaaaattgagggggagaatgcaaaccagaccattaaaaagcaatgtagagtctacacaaattaatacaatgatagcataatcaggttgaaaatgacataaaatcaaatgatatgtagctgtccttatggtgtatcacagctcctgaaatcttaaagagtaagtgaaaatacggggcctcctgcagcgtggtgaacatagcaacctttcccagtgactccctatacagctttagcagcctttctgaaagccactaagtcagtcagagaaacattgcagataatgcgtatttgcaaaagcagccccactggaggactgcacgagtccacacctgatcatgatctccaaattgaaccacttttgctgtcaagtagagacgtagaacattgaaaccaggttaaaaaacaaaacaaataaacaaaactgtaaaacctgatccactggctgctcgtctcttttcccctgaaccccatctaggtcggtcctgaaaggtcttccacggtagagatgaaaagggtggctggaccacttcctgtgcagaaaagagtcttgggttagccctgatgcttctgtgacatgaattcaaagggggagaaaattagaaaggaaaagaaagatgttcccaacaaagggctttcagaaaacaaccttgtgtgaagaaatcaaagtgttctgattatcaatagcagcataacaacccaccccaaaatgaaacaacaatttattattgttgttgctaaagaaatgacaatttattattttttattctgtaggttttttacttcttttgttgttggctggggtattagaatgactggaaaatccaaattggccacattcccatggctagcaatttatgctcactgctaactgtaagctcagaaggagctgctggtggaggttcttggttctcctctatggacacctttccacatatctgtttggtcttcctcacaacatggcaccttctttccaagaagaagcattcaagaagaaggaagtagaaattgccaatctcttaaaacctgagcttgaaagtattgggatgtaactttaactatattctatcggtgaaaagcagtcacagggccagcctagattcaagacgaaggaacataagctttcttgtgatgtaaggagtagcatatacacagtgggaaggctgcctttggagggtaatagtcataataaacttgtcatttgactccacatcttaccactctgggggtatttctatgctcttgatccatatttgtgtttctttctctaaagcactgtcatattgcaagagcaacggatgagaaagagatgacttgccctcctgcaattacatatatgtgtatgtgttgatcatatatacctatatgaattgaaagagtcatcagaagcctggaaagaatgacttgcttcatgctagcttttggttttgaataccaattattccccatgttgttatgacaaggacatatatagaaaatgtgcaagagccatctctttaatcaagtttttttttttaattttaagttctgggatacaggtgcagaacgtgcaggtttgttacataggtatacatgtgccatggtggtttgctgcacctatcaacctgtcatctaggttttaagccccacatgcattaggcatttgtcctaatgctctccctctccttgtcccccaccccccgacaggccccagtgtgtgatgtcccctccctgtgtccatgtgttctcattgttcatctcccgcttatgagtgagaaagtgcagtgttttgttttctgtttctgtgttagtttgctgagaataatggtttccagcttcatccatgtccctgcaaaagacatgaactcattcttttttatggctgcatagtattccatggtgtatatgtgccacattttctttatccagtctatctttgatgggcatttgggttggttccaagtctttgctgttgcaaatagtgctgcaataaacacacatgtgtatgtttctttatagtagaatgatttataatcctttgggtatataccaagtaatgggattgctgggtcaaatgatatttttgtttccagatccttgaggaatcactacactgtcttccacaatggctgagctaatttacacccccaccaatggtgtaaaagcattcctatttctctatgtaatcaagtttttaagaaacctaattcctacttcatcttctgatattaagtaactaatacctaagtaaacagttggctctctttttaaaaaaatacttactttataagcccaggacaaaattaaatgacagaatatgagatttcttttaatatagtaaatgttcaaaaatatcagatgatgatgaggatgattaaaattgctaccacagagtctgatgtagtaggtgcttaattaatgacagctaatattttgaagagaagctcttttagaggaaggaatggtgaaggaagagggtacaaccatttgaatgaggagagaggaatgtgagggcgaagaagcttggggtcaggagaagggcgacactcagtgtctcgagaggcatttgacagagctgtctttaataccaaattatcagagacagttttgggattttccctggcacagaaatgcattccccttgagccctcgaataaatacttagaaggttaaaggtcagttcattaatctcctcacttgcccatttgtttggacatacagatgctctgttgttaaggcaatctgagcagacaggaaaaagtgtggactctcatccacttcgatactgtcccacgttggatggaggtgtgtgcaagagaaaacatttgttttaaatttaattctgtgcttttcaaaactgtaatgaaaattggaaagttgtgacttggttcagttcctttccagggtttgtttatgaaacttgccttctagttcacatttgaacaaattttctttgctaagaaaattcttattttcctcaatgacccaaagtctgtcaagcaagagcaatgtaagttcctacctgcccctttgtaccagtgctaccctactgctttacacaaattcaacacatctccaagcttctgagggccttggggaagcctcattcttagagatattgaaagaaaagcagagagagatttatactttttttttttttgacagagtctcgctttgtcaccaggctggagtgcagtggcgcaatctcggctcactgcaacctccgtctcccaggttcaagcaattctcctgcctcagcctcccgagtagctgggactataggcgcgtgccaccacacctggctaattttttaatttttagtagagacggggtttcaccatgttggccaggatggtcttgatctcttgacctcgtgatccacccgcctcagcctcccaaagtgctgggattacaggcatgagccaccacgtcaggcaagacttatactttctaatgaggtgtaatgagggaaattttgactaaagttatctccgctcgactccgcatcatttttttaaatggccaataaacatttttttaattttgattcaaatgacaaatgacttatcctgaaaatggtcagctgtctcagagacattctggaatggaaagaaagcctcgggaaagagctgatgtgacttgctaaaagtcacttctatagacaatagaataaatattgtctatcgaataatagacaatatagacttctatagacaatagaataaataaagaaggcaaattgtgtatgattaccatctacttgcatgagggtgtggcaggctgactttaaggtgattcccccattatctttacctcttgatgttcccacctttgtgcagttctctcctcttgggtgtgggtaggaccaatggcttgcttctgagcaatggaatatagcaaatgtaatgggatgtcattcccatgattatggtatgttataaaatactctgtattattagcagatttatcctagaggctctccttgctggattcatgaaggaagcagccgtgttgggaaagcccacatggtttagaagtatgagtgctttctaagtatgggtggtctctaagaaccataggtgtcctccaagaaaatacaggcagcagactctaggagctgagagcagcctccggccaaggaaaaagctagagcctcagtcccccaaccacaaggaaatgaaatgatacaaagaacctcagagagctgggaagtggcttctttcccagctgagaagtggtttcttccccagtctgtctttcaggaaaatatgtcctggctgacaccttgattacacccttgttggatactaagcagaggagccaactaagctgtgcctggacttctacccatagaaactatgggataatcagtgtgtgttgttttaagccactaagtttgtactaatatgttacaccgtaatagaagaataatacaggggtcctttcctgggtgatagcattctctggcatcctactatcatcttccatgaagacatttgggactacttagagaaaaactcagggttccttctggtattccttatcaatcccaaaatttccccatatttcttaaaatgaggggacttaaaaatgagtctccatagccaggcacagtggctcacgcctgtaatcccagcactttgggaagccaaggtggatggattacctgaggtcaggagtttgagaccagcctgaccaacatggagaaaccacatctctactaaaaatacaaaattggctgggtatggtgacacatgtctgtaatcccagctactcgggaggctgaggcaggagaatcacttgaatctgggaggcagaggttgcagtgagtcaagatcgcgccattgcactccagcctgggcgacaagagttaaactccgtttcaaaaaaaaaaaaatgagtcctcatatttcctacctcaatatgactgtgactctcaaccaaaatgtattattaatgtctcacatatatatatattcatttataattgtattttattgtttcatttgttgcttcatctctgtttatcagacacccaaacacagtcattattagtaaaaattagttgatgttttagtaccatattaaaatatctacaactctactttcaccagaatgtttttaaatttaaaaacaaaaattgaatcacaatttataaatttagagaaaaaatgcattctaggagttctttgttctcactttctcattttacaaataagaaagatgacaccctccaaaaattaataatgtgcgaagcctagacaaacagttattgtcaaaatgggacaagaatgaaatttacattgatagggcatctgcaatgttcaaggcactgtgataaatacttctgtgttaccacttcatccttaacagttttgtaaagtatgcattgctttccccatggcagggtacccttctagagattatttttttctttatttttcaatgagaaaggtgccttaaattaactaattgaagactcccttagaaagtggggaccaggaaggtacaatggagggtcagaacacattagaaacatggaggtgattgcacttagaagagtgaatatagggctagtagtcccattttccaggcaaagctgtataaaactagccccttttagagatgtaaaagcaacctgtgatcaatcccttgtagagaagctttagtttaaaaatactgagttcagagaatatgggcccaaaattcaggacaacaacatattttaatttttttttttttttcttgagacagagtcttgctctgtcgcccaggctagaatgcagtgctgcaatgttggctcactgcaacctccgcctcctgggttcaagcaattctcctgcctcagcctccagaatagatgagactacaggtgcaagccaccatgcccagccaatttttgtatttttattagagacagggtttctccatattggctaggctgctctcgaactcctgacctcgtgatccatccgcctcagcctcccaaagtgctgggattacaggcgtgagccaagggcttaaaagatacattgcccatctccccagggaagactggtagaggaatacaggacactgaccctatatctgtgatttcgggcataactgattcaaccatgaaccagctagctgtttgcatcagttatctattgctgcataacaaaccacccccaaaacttagtggcttagaacaaacaccatttatatagctcatgattctatgggtcagctgagtaggtcttctggtctgatccagctcagttactgtctgctggccttgctcagacatccctggtctgctggcaggtcagttggatgatctaggataatgtggtaggcagaataagggtccccagaaatgtccatgaattaatcctcagaacttataaatatgttatcttacatggcaaaaaatactttgtagatgtgatgaagagtgtagaccttgagatggaagatcatcctggattatctgggtggacccagtctaatcacacaagtccttaaaaacagaggaccttttccaactgggtgtaagaaatgggaaggaagaaggaggaggagagattcaaagcatgagaagatatgacctgccattatcaatttggaagcgagaacaagagagatttaagccaaggagtatgggtagattttcaaagttgaaacgatcatcacttgacaaccagcaagaaaataaagatctcaaccatacaactacaagaaactgatttctcccaacaacccaaataagcaaggaatgcccattcttacctggattggggatgggaaaaaatgtatatttatcaaaccaggagtactgggatgaattctttcaaagactgtttgagtccctatgcagatctttccagctaagatgtagggataagaagatttaattaatatagtggtttacagcatgggcttcatggtaggcagatatcactcccctgcaaaggttcatgtcctaatccccagaagctgtatgttacatgaaatagaaaaggagaattaggcccagcgtggtagctcatgcctataattccagcactttaggaggctgaggcaggcggatcacgaggccaagagatcacgaccatcctggccaacatggtgaaaccctgtctctactaaaaatacaaaaattagctgggtatggtggcacacacctgtagttccagctacttgggaggctgaggcaggagaatcgcttgaacctgggaggcagaggttgcagtgagctgagatcgtgtcactgcactccagcctggagacagagcgagactctgtctcaaagaaaaaagaaaagaaaaggagaatcaaaattgcatatggatagatttctaatcagctaatcttaaaataaggatattatcccagattacccaagggggctcaatataattacaaggaactttaaacatggaagaaaggggcagaagtgtcaatgtcagagttgtgctatgggaatgagatgagcagacaccgcttgctttgaagataaaggaacggaccatggaccaagggaagcaggtggcctcaagatggaaaggggcaaggaaatggattctcccccagagcctccagaaggaatgcagctctgccaatgccttgattgtagcccagtaagaaccatgttggactactgacctgcagatctgtaaaataatacatgtgcgctatttaagctgctaagcttgtggtatttttctttttaatggcagcaatagaaaacgaatgcaagagcatctcattcacatatctggtggctggaagatttgttgatcagggaacttcaactctcatggcccctcaactccaacaagcaggtctgagcttcttcccgtaataggctcaaggatccaaaatccagaaatagaggacacattttcatttccaaatgcttttacatctcctctttagccatgtttattactgtttgactgctcaaaggcggtcttaaggctagtctagattcaggagaggaaaaatagactccacctcttgatgagagaagctgcaatctaacaagcaagggcaagggagtgggaggagaaatatttgtggtcatcttgtaatctactgcatgatctgagaaggagcccagtgtgtgaaccaaaaacacctgctagggaaaggcatcattccagtttctgcatctagggtggaatggaagactgagtttcactgtacatctaggacttaacgacagcattgactctgctcccagtgcttctcatactatggccaaaacaagaaacagtgccctttccctaccttcttctccctcagcccctaaatgcaggaagcatcatgctaacatttcccagagacctgtcagtccaaggagatgtctgaccacatatagtgggaattgttacaaacttgctgtgaatatcacctagggagagggcccaggattccaccttctggtgatgaacatgcagaggcatgaggatcacaccctgaaatgtggagacacccatatattccagttttacggataaagaaattgaagttttgaagaaatgaaaccatttgctgaaagccacatcatggcagaactgagctagatcccagaaatatggactattgggaggcagcaaaatataggaaggcaaacagaaaccttggagatacacacactgcaatccgacactgctgattaccaataaacacccttcccttcctctacctccctgcgtggcagaatttcaatttcatttcaatttccactcctctccctatggttccaggaagggcggcccctaccccaagtttgaggaataaatctcagttcagctaagccagtgatagtggccctattccttttgtctataattacagttgatccatgaacaacacaggtttgaactgcatgggtccaattatacacagattttcttccgcctccaccaatgctgagagagcaagatcaacccctccttgtcatccttctcctgagcctattcaatgtgaaaacaacaaggatgaagacctttacaatggtctatgtccacttagtgaataggcaatatattttttcttccttttaattttcttagtaacattttcttttctttagcttttactgtaaaaatacagtatataatgcatataacatataaaatatgtgttaattgactattatgttattggtaaggcttccagtcaacagtaggatattagtggttaagttatacaccaagttttgactgtgcagagatcggcaccaccaaaccacagcattgtcgaagggccaaatgcagcttagccatgagcatgggcagtactggctctatgggcatgcagccagtccatgctgagtcttgtgcccagaaggacctaatgtttcattcaatgcttgtcatcatcctaaaattcttagtaactgttgaacaagagatcctgaatttaattttgcactgagccctgcaaattatgtaactgttcctaagcatatggtgcaattctgttgaaaatgacatggggaagcttgttggagaacttttaataaatattttctttgttgttattgacaggaaacatacacatgcacatatacacgcacaaagacacggccttcttcttacgcatgcaatgcctggaactcctgcagccatcttgcacccttgagcaaaacaaagcttacaagcttgacagagcagaaagttggaaagaacctaaattctgatgatgccactgagctgctgaatgaatgagcctttgagtgttttgtcatgtgagataataaaccttctgctttgtttttaccatttgagatggaattttccttaaagattttgcagaatacatgtaatcgacaagtattaactagatgactttgagaatggtatttgactttggtgagcatattttcctatctataaaataagagcaatgccacctcacacacatgttgtgagaaataaataatatttggcacacgacaggtgaattagttcattcttgcactgctataaagaaatacccgagactgggtgatttatttaaaaaagaaacaagaggtttaattggctcacggctccacaggctgtacaggaagcatgatgctggcatctgctcagcttctggcagaaggcaaaaaggaatcacggaaaaggcaaaagggaagcacgctcctcttacctggccagagcaggagcaaaagagagaggggacagggaggtgctatgcacttttaaacaagcagatctcacaagaactcactcgctatcatgagaacagcaccaagggggatggcgtttaaccattcataagaaaccattcccatgattcagtcacctcccactaggccctgccttcaacagtggggattacaattcaccatgagatctggccaaggacacagattcaaaacatatcagcaaggaacagtccaatgatggtagtaatagtgattgtcattgtgttgttattattgcagttcctagcccagtgctattattcatcataacttacaacctacccccattcctaccctattttaaatatattttagttcaccattcataggccacttaaatatatattcactcacaaggaaagcacttcagttaagaaaattctatatagtgcctatgagtcacgtgaatgccaattatgaaagctgcttagttcatgtctgtatgtgcgctccactaaaccagctcatttatcccatacctgaaccaggaactatcaaaagtaaacttagatattcacataacaatatatttctcaaactcataatacttagtgaaaaaaagttgtaaactgatatgtattatataccgcacgttgcccttaaatgaatgtaaaatgatcataatgacttctgcttctgggaggatgaagtaaatgtattttttcctattcttcccactaagtacaacttaaaaaaaaaaacactggatgttagatctaaagctaacatataaaaagactttgaaaggtgaagagaaggaggtcaacagcctagtggctgttggaaccagaagaatggcatggtggtggattccatagctttttttttttttttgagatggagtctccctctgtcaccaggctggagtgcaatggtgtgatctcggctcactgcaacctctgcctcctgggttcaagagattctcctgcctcagcctcccaagtagctgggactacaggtgcatgccaccacaccttgtatttttagtagagacggggtttcaccatgttgaccagaatgatctcgatctcctgacctggtgatctgcccaccttggcctcccaaagtgctgggattacaggcgtgagccaccgcgcccagcccataggttttctttttaacttcatatatcccagacttgaagcaaaggtagcctgtgatcaggaaacaccaacaggctcagacaaaaagatcccggtaaaattctgctgagtctaaccacagaccgagggacggggcagcctagagcaacagaaaacctgtaggagtaactgctctactctagccaaacaccgcaaaagaaaactgtggcccgcctgccgtgccatctccatcatcaaaggccgagtgggaagcttagacttccacccaccccacgaagctgtaacaaagtgccgaacgcccccactctggcccagggcggtgccagagaaggccaggtaagagactgagattttcatccccatgagccagtaaggagctccctggcccctcacaatgtctatggagaccgcatgggataggtgctgaaactcccaccccaccccacagtaaggaggagcccatctgatcccataggtatcaacagagaccaagtgggaaacctggacttttatctccctatggcacaaacaagttgacaacccccctcttctgccagagcagtgtcagaataaaccggttaaaacaaaaaatttaggctaggcgaggtggctcgcacctataatcccagcactttgggaggctgaggtgggcagatcatgaggtcaagagatcgagaccatcctcgccaatatgatgaaaccctgtctctactaaaaatacaaaaaaaaaaaaaaaaaaaaaaaaaattagctgggcgtggtgacgtgcacctgttagtcccagctactcactaggctgaggcaggagaatcgcttgaacccaggaggcagaggttgcagtgaactgagatcaagccggtgcactccagcctggcgacagagcgagacgccgtccggaaaaaaaaaaaaaaaaaaaaattaaataagatccaatgtcacataacaccctacaaaaatgcacgtttcaataaaaaaaatttatcctatcaagaaacagaaagatctcaaactgagtgaaaaaaagacaacactaagacaagagagatattaaagtgatctgacaaaaatttaaaacacccacaataaagatgcttcaatgagcaattatgaacacacttaggaatgaacagacaaaaagtggcagcaaagatatagaaccaaatggagattttaaaactgaaacatacggtagttacaaaaaatatggaacaatacagaaataaaaacctcgatcagtgggctcaacagcagaataaacggaacaaaggaaagaatcagtgaactgcaaaatagaaccatagaaattatccattctgaacataggagaggatagaatggaagaaaaaaatgaacaaagtctcagggacccttgcaaccgtaacaaaaagtttcacatttgtgtcattgggcattccagaagcagagttaaaaaaaaaaatgtcctggccgggcctggtggctcacgcctgtaatcacagcactttggggggccgaggtgggcggatcacgaggtcaggagatcgagatcatcctggctaacatggtgaaaccccgtctctactaaaaatacaaaaaaattagccaggcgtggtggtgggcacctgtagtcccagctacttgggaggctgaggcaggagaatggactgaacccaggaggcagagagtgcagtgagccgagattgcaccactgcactccagcctggggaactgagcaagactccatctcaaaaaaaaaaaaaaagtcctgtgttatactcagtgtctacatgcaaacccagctgtaagacaagtctccaatgtctgactcctcaaagtgagattcaagggccagcacatcagcatcacctgagagcttttcagaggcacatcatagacctaacaggcctgaatctgtacctgcaagatcctcaggttaaaggttgggcgtgggggctcacatctgtaatcccagcactttgggaggccaaggtgggaggatcgcttaaccccaggagttcatgaccaggctgggcaacatagtgagactccatctcttaaataaataaatatccccgggtttgcatgaaaatctgagaagtatttctccagctgccttctcctttgccccaaccaaatggatacccctgcatccttcttacataaaaattctggacttccctatgaaccacagattagaagcagatcaaaaaagaatcaatgtataaaactaggaaaagtattggactaaggggtctgaattttaaatctccatcctgaacctttttatcagtgttggcaggattgctggtttttgtttgtcttccttatgaatttaggggcgaagacaaactagaaaactagaaggttcttcctatttgaatattctaggattctattacatgccaatcagattaccaaaaactacgcaggcaaagctcatgcacagggaaggtctttaccatgtctggtgtatgattatgacaggaatatttttgaatctaactgtaattctgtttaggaatttggataacttgagctttgcgcctgcagcttataatatcactggatacctgtcacagaattgtaaccttgtaactcacttacctgttgatgctcaaatatatacgtatataattttaatagtactcattacacatagacttccattataacactatttccactctgtcataattttataaaaaattccctattggctaaaattttccaggctgaatcacactcttgaggtgaactttttcaattaaactccacttaagccaattttgaggtctttgaatgaaggaaaaatatatatatgccagactcttaaaaataattgtcaggcaggttctctgttttttttttcttacatgtttatttaacacactatcatcaatacttcaaaaaaaggtctgacctgttttgcatgttaaatttcccaacgatggaggcagaagtgcttttttgcttagaagtccccaataaccctctcaattatctcctctgccatggagaattatggagagtctgtaaaacaggtagttagttctaggcttgtggggccacttagcatctatgaggcagaattcagttaatacacattaactctcttccttacaaccatgtcaaagttttccatttagggactaatgagaaaaaagtcatttggtttattgatccagtgtgagtcatctagaatggggaaaaataggtaattatcactgttttgaatcacttcctttattgtttctaaacttgattctggaacccacaacctctgttgattgtgttatttttacaggggaaaaacaagctttgacttatctctcaaagtaattagaaggcagtgccttctggcatttggtcctgtatctgatcgtctgtttggttgttttgttttgttttgtttttcagcaaatgctttgtattcactctgtacatcttcatttggttgattgggagcaggaagtctgccacaatacacacagccaaactctgtggcatggccagcccagggcagggcaagagtgaattctttgctggattcttcatgcccaggccttggtgccaattgacaagtggtggagacttacttcttgattctaaagagatctctccagcacagttgcacagaaaggatgaaaaaccttcatggatttcaattgccccttctcccagctaaagcttttgcatgctgcttagggaagaaccatgtctgaagagctccagttgggcagaaatagtcttctgtattgggaggccgaggcgggcggatcacgagctcaggagatcgagaccatcgtggctaacacggtgaaaccctgtctctactaaaaatacaaaaaattagccaggtgtggtggcgggcacctgtagtcccagctactcgggaggctgaggcaggagaatggcctgaacccaggaggcagagcttgcagtgagccaagattgcaccactgcactccagcctggggaacagagcgagactctgcctcaaaaaaaaaaaaaagaaaaagaaatagtcttctgcagaaaggcaagacaccttggaccactgacttcttttctgccagagctcaactctgtcctcttcttttcagggaagccttttctgccttctttgaagaggtcactttgctctctgtacaacggtcacactgatctttcagtcctggactatgccatcctacctcctgccacaggaccttggcacataccattccctttgtctgagacactctaactacccctctttctctagtgagctccactcattatttatatcttagtttatatttcctcagggaagaaattcagcctttttggtaagtatgaacaatcatgtattaaataaacattttaaaaaagagataactggctgggtgcggtggctcaagcctgtaatcccagcactttgggaggccgaggcaggcagatcacctgaggtcgggaggtcaagaccagcctggccaacatggagaaactccgtctctactaaaaatagaaaaattagccgggcatggtggcacatgcctgtaatcccagctactcgggaggctgaggcaggaggactgcttgaacccaggagggggaggttgcactccagcctggttaacaagagtgaaactccatctcacaaaaaaaaaaaaaaaaaaaaaaagttaacctgcctgacagtgattttcccaatcaaatcaacctctcctaacgtttcgtaacataccaacatatgctcccatttcatggtacctgtcactgctctaatcttacatttatttgagatatttttgctttattaatgagagtatctattgtagctgcctgaggatttagaccacatataatcctgatgcttgacatagggcttagcacatagcaggtactcagtaattatttgttagataaatgacaaatatttggctgggtgcggtggctcacacctgtaatcccagcactttaggagactgtggcgggtggttcacttgcagtcaggagttcgagacccgcttgatcaacatggtgaaacccccgtctctactaaaaatacaaaaattagctgggcatgctggcacgtgcctgtagtcccagctactcgggaggctgaggcaggagaatcacttgaacccaggaggtggaggcttctgtgagctgagattgtgccactttactccagtctgtgagactctgtcctccaacccccccaaaaaagtcaaatatttgttatatagtatcaatgaatgaatacgtcatttattagacatttccagggggaaggaagatcacagggcctaacccacctctgccaaattcctcagcatcagaatgtgcctgttctcttgtatgatgttgttctcatcttgatacatataagacctgtgaaatgagtaaaaggacagaaagggaagagttccgaagaggatctggggaagcctccattgagctctatgtaaaacaccttctgagccaaaatgctgtaaacctagaaatgaacctgggacatcattcctgggattttccaggtgaagaaaatgagactcatgattccactgtagttactggcagaccccaccccttcttactcctcatcccttcctgatccacttctcctacgaggagacagcccttaacagagatgcaaaaattgaagagagtgcagaaattaccaggagctgaagccctgagcagagacgaccacaggagaggaatagagtgattaattacatgtaaaaccatagggtctagcttcactgggaaggccccaagggtataattgtcctcttttttccgtaatctctagtgagctcttttattctttaatctatgaagacactaaaggaggtcaaatagaaaaacttacccaagtctcactcattttgttaatataaatcccacctgtgccactttcaagttgcttgtaaccaatctcatctaagttttctcatccataaaatgggaacagctgagcccatcttttagggttattgtgagaatgaaatggaatatgatttataaagtgcctgtgcatggcacataagaaacgcttcgtatgacctagtttaattcaacattaaacgtatatgtgagtgcttactatatgtctagttgggactaagctaggtactagggctgggacttgcattacgatggaggaagaaagacatatttaagaaacaaaagaattgccagtaaggctcagagatatgaataaaatgttacagagaaactggaacagagtggggtttggctactcataaataggttaaaccaggagatcgtcttagaggatgtgacatttaaactgattcaaccatgtaaagagttggggaaagtgtgtttcgacccaggaaatactggaaaaagaaagtataaggtattgaggtggggatgtccttattcccagtgtgacgggaagcctatggaagtgtttcagcaggagtaagagagaatctgagttatattttaaaaagatctttctgtctgttatgtggagagaatgggttttaatggggcagagaggccagttagaaagctagtgtggaaataaaggtcagagatagattgatggtggtatggactaggatgggtgggagggagaggagtgaatgcaatgaagacgtattttagagacagaggtaaggatgatctgcaggaaaggggaggtggtaggaaaaagggaggaattgaggttgagtcctagttttttgtcttaaacaactgaaaataatgatgtcatttgtcaagatggagaaaaatggaagaatgagactctggggcttttggtgtttgctttttttgttttgttttttttttttttaacaatgtgggaggtagatctgggaatctagaaatctgtgttgtccaataaaatatagctcctctcagaagggttttaacaacatagaaagtacgaatttatccagaatggtgacatggagagctctttaggagaaagaaaatgaattagttcacttctagcaatgctactcattctttagaaattggggttacttctttctggtgacagagtcctcatatatgctatgagatcattttttttaatgcagataataaacaatgatgccaagtaccatccgtctttgtttcccaggaatcccatttaaccacatttcctttctttgttctctgttttttcttttgaggtttgaggcagaaaaattctcaaaaacagcacagagaacataatacatgcctttgttccgggaatttagtaatgtcagtcacactctgtttaggaaaaattcaagagtttacctttaaaagtagttaaggttttgagggatcttactttattataacagatggcaaagcctgtaaacaactcagtgtcactttcatataagctttttatttttaacacaaatacaatgaaaagagcattagacctgagaaaagatagcagtcccaactcaaccattaaaagtcacctaccctctatgggctttggttggtttgcctgggaataaagagaacttggactccacatcctttccagatttaatggtccatcaaatgttggccagggtgagacaaacttgctcacactaatcaaggtgatgaacgtgtgtgcatttgcatttcctggtctttgatttcccagatgctctgccttgctccctgcaatgcagcccatcgctttgatagcctgtcggcttgacagctctttccataaactctaaattggcaacgaagtttggagaaaagaaacagcctttacgtttcagaatcgaccctcagcataaacgtcgtctgggggccacatgtcttggagaggagtcattttcaaccaagagtgcttcaagtcacaagtcattccagctttgattcattttgggaagctgccttgcctgcctgacaaacaggggaaccaccatcagagagattatacaatgtgtaatgccatggtaatcaggcttgtcaacttattttataacaaatctgtggctttgatttgaaattaaggcaaaagtcatggctacaaagtgatgggcagtaagataggaatgaggcaggatggtgaagaacaaaggtagcaggctggaaacacaggtcttcgctctagaactactcttgcccctaactggctgcatatccttgggtaattcattctgtcagacccagtctcctcatctgcaaagtgctggagttgaaccatcacctctcatgtctcttccagcttggagattccacaagcagttgcggggccctgttagtgtctgtgcatacaggacaagagaacagtgctatttggcctaactggacttgatataccacattcttcctcccatagagaaatatcaggcaaggaggagtggctgccctctcccagtaacaggggctggggcgtggggaggctctaatgaaggatttcacctttccctgaaggtttccactagggtctttgagttggagccaagacaggtggcgactagaggggaatggtgattagtaagacatgatgaggtggaacctgcagggtgaggtatttactttgtccttctctacaggaggagaatgaacagatggagccttagaccttcacgaacattttattaacttaaccttgaatgtgcaaacaggcaaaagcctaaaccctaaaggccaaaaatattaatattgattctcttttctttcttaaaaaaaaaaaagaggtcaatcccataatatttccccagattgaaactattcatagtctcttaaaacacacaactggagccagagaataggatttagagagggggcttttccttttgggctttttaaaatggaaattaatgactggtattttgctcaatgaaacatttctcctaagaagctaataattatttgagcagtatgatttcaattattcttaacagtgttaccagtgccctgaaaagctttcaggtagaaggagacgatagctctatcaggagttatcatatgccctaaaccaaggcatggacttcctgtccctttttgaacactactgttttttccattcagttgagtatgaattctgtgacatgcattctgttatacactgagaaggtgataaacaggacagataagtctcagccctctcctatcttttacataaatttgattcccttcctgtttttttttaagttcctccataatgtggccccattctatcaacccaaactattttccactattcatcagtgtattttaacctactctgctgtttgtccccacacatacatacatgcatacctcaccagtatgttcacatagacaaatataatattcagttccgcgttgcttcattttttcatgttcccctatactattgataactctacaatctcctactcatttctctaaatcccacccagatttgaagtctcaacaaaaataccccttctcgggaaatttctttgctaactttgctctatatccttttgctcacacatctaatcaatccttttttctagcaccttttttcctccttatttgctgtatgccaatttgcttatcacatataagttctatagtccttagaaaaataaataatattttacatcttcagtagccccacagtctttgttcagtgttagtctcaaaataagttttcaagtccttgcttggttggttaaacatgttgtcactaatcaagataagctactataataatggtagaaactcaaccagatggcagatgtttagagcaatatgctttaatctaattaacatgctttaatatactacatttatctgaaccttaagcagacctttcccttaactctataattattaaaatcacaaaacattccaggacatcatactttaatgtggcacatatataaaatatctaagtacaatttactacctttctaacttcaattattatacttaattaaaattaaagttttaaaaaaatctgtttcttctttagtgctctgtaatgtcaccttcatcatgaatcaattgaccatatacatgtgtttatttctggactttccttttaccctactggtctgtttgtccttatgtctataccacctagccttaattacaataaatcttgatatctagtagaacataatttatacattgtttccctttaaggatgtcttgattattttcagtcttatgcatttcctaatgaatttagggataaggctgccaatttcctccaagatacctgctggtgttttggttgggattgcactaaatctagaaatgaatttgagatatttgacatctttactatatggaatcttatctcacatgaacaagagatatcctgtcattaaaaatatgatagccaaatgggaaaaagtaaaacatgatcccctacctcacaccacacacaaaaatcaattccaggtagactgaagtcctgaagttccaagtgtgaaaactaaaacaatggaaggtctagaaaataacattaagaagatttttatcatcatgggagtaggaaaggacttaaacaggacaaaaaagctaactataaaagaaataataacttgggttgcactgaaattacaaatacagtataggtactagaggagagtgaaaatgcaggctattgagtgggagacatttgcaaaacatacatatatatataaaacaaagggattatacccaaaatatacaaagagctcttacaaatcaatgaaaaggacagaaaacttaaaggaaaattgggccataaacttgaagaggaatttagcaaaggaaattcaaatggccaataaacacaaataaagatgctcaatgctgtatttttcatcagggaaatgaaaattagaactacagttagataccaccatgcacccactataaagactattattatcaagtcctagcaataacataaagcaacaaaaacttccctacaccaggaaatggaagttggagtgaccgctttagaagatccttgagcattaattgaatatatgtataatccatgaatatatgggttgaatatacggattgaatatatgtataatccataactcactaatcctactccttatacagccaacagatattcatcaaagacctgtgcagcaaaacacatgaacaagaatagcagcattatttgtaatggtcaaaaaaattaaaatagccctaatccattaaattccatcaatgataatctagattttaaaacctgtagtttgtttttttttgcaacattgaaaataagtaacaatttctacatggatgaatctcataaacaatgttgagcaaaaaaatccagttgaaaaataatttatactggataatcacactgataaaagttcaaaacaggccaaattagtctatacaaaataggagggagtagatagtaactggaaggaatatgaggagtcttctgtaatgttgataatgactaggtggtgatcaatcaggtgtgcttactttgtgataattcatcaagctgtgcacttgtaacttgtatacttttctgtatgtatattatatttaaattaaaatgctttttaattagataaaatttactaccattgtttcaaaacgtgagtgtaaaatatggattcaacattaattactaaaggaattaaaattatatcactctggcatattgattatttaagttaaagatatttgaaaaacaccaagtgcaagaagatcactctgacattcacactgctttttaaaagtagaagatgaaattctcaggtgaaagatagtctccctattaaaaaaaaaaaaagcaacattcttatgatgaaggttagaaaagttaagccaaaggaattctatataaactaaccttgttaaactaacccttatcttcctagtcacttttctgcccaattaaatatcctcatccaagtcctttgccttatcacatcttcacaacttactattctttgttcaattaagtatataagtaacgaactgaactatttcttcagattttcatttccttatgagcgctttcttgccacataaaactcatattaaataaacatatatgcttttgtcttgttaatctgttttatgtcaatttaattctctggcccagctaggactctaagatgatggaggtagagttttgccatgcctacagaaaaatagtttctgaaaaatctgaagtgatatgtaaatatgcttaacacttagggagagatggcaccttttctgcttgatgccatcagttttcaatttttacttggttaacctgttctttccttgccattcgttggctgttctggatccttgataaccgggtggtgggattaggacaccacttggctgttctgactcaactgctttgacttctgatatcttgccagggctagaaaggtctcacagccactgccacaggggtgtcattactgcccattttcagcaaaaggaaattgctttgacagtctattttctctgtaaacctgcaaaatggtttgtcaccttcctggctagaaacagaaaaggttttagaaaatgctatgctattattcactcatttaactgctatgatttttaacttttctgccttcctaatagctccatgatgaaaaagcccaaggtttagactttctcatcaatgacatctgaggagccttcttcattacatgttcattagttgttcttttttttcctctctgcccaggtacaacagatgcaacaggaagagagaacagacaattctcagatactcttttagatctgctaaagcttcaatgcagtagaccagagtagaaagctgtagatgaggtgatagtaaattcatttgagtcaactctcctgacttctctttcataatataaacacataattttcccttgtatccttacaaaagagagacttcaatatccataaacatgtatttctattttgaggttacagacataaaatttaaaaattcaacagttctcaaccatttcctttagcaatcgcccatacatagactatgatggaaattaactagcaatgcatgaaatttctaaaggagctccttatgatatctctctaaaaaaattttaaaaggagctataaagttgttaaacagatttatggtagttttaatgtatctactaaaatgttggattcatgtcggcttttgtattaaggaaaaatgatttcctaataaccccttataaaagtaattgctgattctaaagccgttatctttaaaaatgctaatatagttttcttagtaaagcttctaagcaatactcagtatgcctttctcattttacatatattcctgacactgataaatatcaacatattttatttttgttttgcaatttctttttataaagacaatttttaacgagcagtttcaggttcatagcaacattgagtggaaggtacggagatagcccatatgctcacttcctcaacacatacgcagctcctccagtaaggacataccccatcagagtggtacattctatacaattgatggacttaacattgatacgtcattgtcacccagagtccataatttacattaaggttgcctcttggtattgtatattctgtgggtttggacaaataaataatggcatcaaccaatcattgtacaaagtagtttctttttcttttacataatttgtaatatttattaataaataaggagttatatataatcaattcaccgatggcacttttatcacagactaaattcttattaagttgttctgcctcgggcctttctgttttgttgcattaatgggtctaacgatccataaaacagtaccacactttgaattcttaaaatttaaaatatatctttaaatctgcccaagaaaatgcttcttcctttctgtgctccacacctgctctactgctggagtcattgctgccaccgttacctgattctcctctctttgagaaagaagtaagattcacaaccaaatccctttggttggggagtgccatatgacttgttctggccatacctcatgaactcagtgacgtgctatttccaggccacagtacttaatgatcagtttgagaccctctaaagatctcttttatctgctgcagtacctgccaacctctgagctggaggctgctacttcagctcgaattcatagtaaggaaacaaaaagacatcaacctgcaatgaacacagcatcagaaataaagctttgttattttaagtcattgagctgggcagagaaggaaagcgttgttactgcgtcctaactgagttgattccgactaatacacagcaaaataattgatgttttcaaaaactgccccaaatctcattaggattttgattagaattgtattaatcctgaagattcattttggaggagctagcattttcacaatattgaatcttcccgtgtccaagaatgtgatatgactcctcactcatgtctcttattctgaataaggttgtatatatttcataaagtttacactaagagctaggcatgtattgctatttcttatttatgtttgttcccatactataaggatttttaattattctgcaactggacatgctggtgaattttcttaatagttctaatagctttggattgagcttgttgttccctaagtcaaaagtaaatggtgctgaataatggtaattttatgtatttctttctgctaatgaatgcctcatttctatttcatatcttactgttttagatggaaattccagaataaggttgataatatctttgaataaggatatttttctctcctttatcagaggtcagaaagctttttctgtaaaaagtcagattgtaaatatttttagctttgagaaccagaccatctgtcacagctactcaatactgccatggtagcataaaagcagccacaaccaacaaataaaaaaatgaacgtagctggatttgactgataaacatggtttactgaacctttttctactttaatggcaaggcttttaatgttttgccattactatgattttagttactaatttattattttaagaaattattcctccaattctacattgcaaaatttttctcttttttgataattcatttttgacttcaatcaagatcattgttttaaaaatctgttacatagtaattaaattaatagatgctaaatttctctagaatgttctacaaattttctagtattaaaccactcttacatccctatatgagttttacttagttttatttttgtttttgttttgtttgagatggagtctcactctgcagcccaggctggagtgcagtggcacaaccttggctcactgcaacctccgcctcccaggttcaagcgattctcttgcttcagcctcctgagtagctgggattgcaggcacctgccacgacactcagctaatttttttgtatttttagtagggatggggtttcaccatgttggccaggctggtcacgaactcctgacctcaggtgatccacccgccttggcctcccagagtgctgggattacaggtgtgaaccactgcacccagccagccatttttatttattcctggattttattaaacaaaccttaattggatgctcatgatgtatcaggcacacttgtagaagtaatggatgcagcagtcaacaaaatagaaaaaagttcctgctctcatggagctgacattctagtgggaggacaaagataataataaattcacttaaatatgtcaggtgaaggataagaaagcaaagacaaagagtgtcagggtagggtgccattttagaaatgaggttcaggaaggcctttctgatcaggtgacatttgagcagaaacttgaaggaagtgagggcacagtctaataaattaaataagcaactggaagtagtacactaaattgccaggatagagaataagcaggatgctagaggggcacatggcaggatcgcctaatgtggtcacagacgtggggtgaggagggcttctgggaggaagcaacgtttattctgagaccttgaagaaaagttacacctgtgtgatggttaattttatgtgtcaacttgaccaggccatggggtgcccagacatttggtcaaacattattctgggtgtatctgtgaaggtgtttctggatgagatgaatatttgcattcataggttgagtaaagcaggttgccctttcttacatgggtgtgcctcatccaatccactgacgatctgaatagaacaaaaagactgagtaagagggaattcttcttgcctgactgcttgagctggggtatcagtcttttcctgtctttgaatttgaactgaaactttggttctcctggttctcaggcctttgaactggtcctacaactacaacatcagctttcctgggcctctaccttgccaactacagattttgggacttctcagcatctatgatcgtatgacctgatttcttataaatctctttatatgtatacacatgcacacacacacacacacacacacacaaccctattggttctattgctctaaagaaccctgactaattcaatgagcaggagaaaaaataatattctataatagcataatttatagtccccaaattagaggaaaagaacagtttcaagcaaatgaaagttcaatatagaggaagagaagaaatgaggtaaagagtggggctgaacagatgggaagaaatcgggttgttcacgatcctgaaaaccttcctgagcatgcgctgtgtcctgtgagcagtgggaagccattgtgtgttttaagtagcaaagttaagtaaccagtggggccaccaggtatcacagccccagtggtcaccaccccattatatccacccatagaatacatgggctagtgcccatggagttcagtcgtatagagacattgaactgtgttttatcatatactgggccacaaggaaaatttagatggactttataaataagaaattgttcatgctacattctctggattaaagcaaaaagaaattataatataataaaagggtagtcaaaatatatatataaagccactgtagagtaggaaagatactgttctacccatcatgatcaaggaccctataacaaaagacagattaacagagagaagcataaaaaagatatttaatatagatttaacatgacatagaagtcttcacaagaaaatgaagatccaaagaaacaggtacacttgagtagctttgtgctggttttgatgaagacttgagagtggaggggaaacgtaataaagcagaaagggtgtgatctaatggtaataaactgagggaacttagcagggcctatttgttcagattcttctctgtgaccctgtgtcctcagggataaggatgctcatccattcagaggtatagggagggcacctctcacatgagggttttgtgacctggttcaggggaaggtcagaaaatccttcccggttgtatgacctgcttccggggagaatgatgtgggaaggtcagtgagaccttcctgattctgccgttattataaattccttcagcttgatatattcaataggccaaaatgccctattttggggtagtgtgtcctgaacacatataggaaaatttttaaattcttctgtaaaataagtcttgggccaataagtacatgaaacctgcagctatcaactttatggacattaaaaacaaattaaaaacttggagagaaaatgatcacagcaattcaaagaccaaaaaaatcataggcttgaggcttaaatgagaaagactggcttaaatgagaaaagtcaaggagaaaaatgacccaaaggataaagggcctctgtgtttgttgtgctctccacccatctttatgcctgttgccctcactttcttcaagtccctgcccaaattccacctgatcagagaggctttccctttagcccctttctaagatagcatcctttccctctgctatccgtcactctctacctctgctttattatccttcccctggcacattctgtgtgtctttgctatcatctgagtcctccccctggaataaagctgtgagcgcagggacctctgtctattttgtcccctgcggcatcccctacttctagaacagtgcctggtactggggctccatgtggcaggtctgtgactggcctgttcaaacttcatcccctacccaggccaggcatttgccagatgcttaataaatactttttgagttaatgctacaatgcatcactggacatcttttaaaagtaatattcttttggaggtatcaaatctatctaaaaatatatagggatcgttccaagatggccgaataggaagagcttcattctgcagctcccagcatgatcgatgcagaagacaggtgatttctgcatttccaactgaggtgcctggttcatctcactgggactggttggacagtgggtagcccatggagggtgagctgaagcagggtggggtgttgcctcgcccaggaagtgcaaggggttggggggtttccctttcctagccaagggaagccatgacagactgtacctggaaaatcgggacactcccaccctaatactgcatttttccagtggtcgtagcaaatggctcacctggagattatatcccatgcctggctcagtgggtcccatgcccacagatccttgctcactgctagcacagcagtctgagatcaaactgcaatgtggcagcctgggctggaggaggggcatccaccattgctgaggcttgagtatgtaaacaaagcagccaggaagctcgaactgggtggagcccactacagctcaatgaggcctgcctgcctaccactgtagattccacctctgggagcagggcatagctgaacaaaaggcagcagaaatttctgcagacttaaacgtccctgtctgacagctctgaagagagaagtggttctcccagcatggggtttgagctctgagaacagacagactgcctcctcaagtgggtccctgacccccgtgtagcctaactgggagacacctcccagtaggggccgactgacacctcatacagccaggtgcccctctgagacgaagcttccagaggaaggatcaggcagcaatatttgctgttctgcagcctccgtgggtgatacccaggcaaacagggtctggagtggacctccagcaaactccaacagacctgcagctgagggtcctgactattagaaagaaaactaacaaacagaaaggaatagcatcaacatcaacaaaaaggacatccacaccaaaaccccatctgtaggtcaccatcatcaaagaccaaaggtagataaaaccacaaagatgagaagaaacctgagcagaaaagctgaaaattctaaaaaccagagcacctcttctcctacaaaggatcacagctcctcgccagcaatggaacaaagctggatggagagtgactttcacaagttgacagaagtaggcttcagaaggtcagtaataacaaacttctccgagctaaaggaggatgttcgaacccatcgcaaagaagctaaaaaccttgaaaaaagattagatgaatggctaactagaataaacagtgtagagaagaccttaaatgacctgatggagctgaaaaccatggcacaagaactacgtgacgcatgcacaagcttcagtagccgattcgatcaagtggaagaaagggtatcagtgattgaagatccaatgaacgaaataaagcaagaagagaaatttagagaaaaaagagtagaaagaaatgaactaagcctccaagaaatatgggactatgtgaaaagaccatctatgtttgattggtgtacctgaaagcgacggggaaaatggaaccaagttggaaaacactcttcaggatattatccaggagaacttccccaacctagcaaggcaggcagacattcaaattcaggaaatacagagaacaccacaaagatactccttgagaagatcaacctcaagacacataattgtcagattcaccaaggttgaaatgaaggaagaaattttaagggcagccagaaagaaaggtcgggttacccacaaagggaagcccatcagactaacagtggatctcttggcagaaaccctacaagccagaagagagtgggggccaatattcaacattcttaaagaaaagaattttcaacccagaatttcatatccagctaaactaagcttcataagtgaaggaaaaataaaatcctttacagacaagcaaatgctgagagattttgtcaccaccaggcctgccttacaagagttcctgaaggaagcactgaacatggaaaggaacaactggtaccagccactgcaaaaacatgccaaattgtaaagaccatcaatgctaggaagaaactgcatcaactaacgagcacaataaccagctgacatcataatgacaggatcaaattcacacataacaatatctaccttaaatgtaaatgagctaaatgccccaattaaaagacacagactggcaaattggataaagagtcgagacacatcagtgtgctgtattcaggagacccatctcacatgcagagacacacataagctcaaaataaagggatggaggaagatctaccaagcaaatggaaaacaaaaaaaaagcaagggttgcaatcctagtctctgataaaacagactttaaacaaacaaatatgaaaagagacaaagaaggccattacataatggtaaagggatcaattcaacaagaagacctaactatcctaaatatatatgcatccaatacaagagcacccagattcataaggcaagtcctgagagacctacaaagagacttagactcccacacaataataatgggatactttaacacccccctgtcaatattagacagatcaatgagacagatggttaataaggatatccaggacttgaactcagctctgcacgaagcagacctaatagacatctacagaactctcccccccaaatcaacaaaatacacatttttctcagcaccacatcgcacttattccaaaattgaccacatagttggaagtaaagcactcctcagcaaatgtaaaagaacagaaatcacaacaaactgtctctcagaccacagtgcaatcaaattagaactcaggattaagaaactcactcaaaaccacacaactacatggaaactgaacaacctgctcctgaacgactactgggtaaataacgaaatgaaggcagaaataaagatgttctttgaaaccaatgagaacaaagacacaacatatcagaatctctgggacacatttaagcagtgtgtagagggaaatttatagcactaaatgcccgcaagagaaagcaggaaagatctaacatcagcaccctaacatcacaattaaaagaactagagaagcaacagtaaacaaattcaaaagctagcagaaggcaagaaataactaagatcagagcagaactgaaggagatagagacacaaaaaacccttcaaaaaatcaatgcatctaggagctggttttttgaaaagatcaacaaaataaatagaatctaatagaaacaataaaaaatgataaaggggatatcaccactgatcccacagaaatacaaactaccatcagagaatactataaacacctctatgcaaataaactagaaaatctagaagaaatggataaattcctggacacatacaccctcccaagactaaaccaggaagaagttgaatccctgaatagaccaataacagactctgaaattgaggcaataattaatagcctaccaaccaaaaaagcccaggacaagaccaattcacagtcaaattctaccagaggtacaaagaggagctgacaccattccttctgaaactattccaatcaatagaaaaagagggaatcctccctaactcattttatgagttatgaggccagcatcatcctgataccaaagcctggcagagacacaacaaaaaaagagaattttagaccaatatccctgatgaacattggtgcaaatatcctcaataaaatactggcaaactgaatccagcagcacctcaaaaagcttatccaccacgatcaagttggctacatccctgggatgcaagcctggttcaacattcgcaaaacaataaatgtaatccatcacgtaaacaaaatcaaagacaaaaaccacatgattatctcaatagatgcaaaaaaggcctttgacaaaattcaacagcccttcatgctaaaaactctcaataaactattttgatgggatgtatctcaaaatactaagagctattttttgacaaacccacagccaatatcatactgaatgggcaaaaactcctttgaaaactggcacaagacagggacgccctctctcaccactcctattcaacatagagttggaagttctggacagggcaatcaggcgggagaaagaaataaagggcattcaattaggaaaagaggaagtcaaattgtccctgtttgcagatgacatgattgcatatttagaaaaccccatcatatcagcccaaaatctccttaagctgataagcaactttggcaaagtctcaggatacaaaatcaatgtgcaaaaatcacaagcattcttatacaccaataacaaggcaaacagagagccaaatcatgagtgaactcccactcacaattgcttcaaagagaataaaatacctaggaatccaacttacaagggatgtgaaggacctcttcaaggagaacaacaaaccactgctcaacaaaaaaaaagaggacacaaacaaatggaagaacattccatgctcatggataggaagagtctatatcataaaaatggccatactgcccaaggtaatttatagattcaatgccatccccatcaagctgccaatggctttcttcatagaattggaaaaaactactttaaagttcatatggaaccaaaaaagagcccacattgccaagacaatcccaagccaaaagaacaaagctggaggcatcatgctacctgacgtcaaactatactacaaggctacagtaaccaaaacagcatggtactggtaccaaaacagagatctagaccaatggaacagaacagaggcctcagaaataacaccacacatctacaactatctgatctttgacaaacctgacaaaagcaagaaatggggaaaggattccctatttaataaatggtgctgggaaaactggctagctatatgtagaaagctgaaactgcatcccttccttacaccttatacaaaaattaattcaagatggattaaagacttaaatgttagacctaaaaccataaaaaacatagaagaaaacctaggcaataccattcaggacataggcatgggcatggacttcatgactaaaacaccaaaagcaatggcaacaaaagccaaaacagacaaatgtgatctaattaaactaaagagattctgcacagcaaaagaaactaccatcagagtgaacaggctacctacagaatgggagaaaatttttgcaatctacccatctgacaaagggctgatatccagaatctacaaagaacttaaacaaatttacaagaaaaaatcaaacaaccccatcaaagagtgggcaaaggatatgaacagacacttctcaaaagaagacatttattgcagccaacagacatgtgaaaaaatgctcatcatcactggtcaccagagaaatgcaaatcaaaaccacaaggagataccatctcacaccagttagaagggtgatcattaaaaactcaggaaacaacaggtgctggagaggatgtggagaaataggaacacttttacactgttggtgggactgtaaactagttcaaccattgtggtagacagtgtggcgattcctcaaggatctagaaccagaaataccatttgacccagagatcccattactgggtatacacccaaaggattataaatcatgctactataaagacacatgcacacgtatgtttattgcagcactattcacaatagcaaagacttggaaccaatccaaatgtccatcaatgatagactggattaaaaaaatgtggcacatatacatcatggaatactatgcagccataaaaaaggatgagttcatgtcctttgtagggacatggatgaagctggaaactgtcattctgagcaaaccatcacaaggacagaaaaccaaacaccgtatgttctcactcataggtgggaactgaacaatgagaacacttggacacaggaaagggaacatcgcacacaccggggcctgttgtggagtgggaggagtgggaagggatagcattaggagaaatacctaatgtaaatgataagttaatgggtgcagcacaccaatatggcacatgtatacatatgtaacaaacctgcatgttgttcacatgtaccctagaacttaaagtataaaaaaaaaaaatggaaagaccgttcttagtcaagggccatacaaaatcaggctacaggccagatttggcccatagggcttagtttgctgacccctggtttataccacttatatttaatgtgattgctttgttaggtttaaaaatatatcatcttgttattttttaaaaaataaaaaaataataaattataaaaatatataactactaattcaaatgtaataattaactattctattcttttgcatatagcagccttttttggtctgattgactaaattctgaaagtcacatgttgttaaggttataacatcaaggttgtatcaacggcttctcgtcttttaagtagctaagctttatacttctcaatattatatatttttgctacataaagttttagaactcctgtccagacttaatttttcttgttttgaatttttcattaataacaaataaacttttgtttccatttaatgcttttagtcttaaatttcattttgtgtgatatttgtattaaactctgggtttatttttgtcgcatttttccgagatatcatttcccatctcattgtttttagttgttctgtgccattttgttttttgtctttcctgtaaacagtatgtagttgaaatttgccttgttacccaatctgagaattctgtcttctaatcagaagtttaatctatgtgtattctcagtgtgataaccagtaaatctgggcacatgttcgccacagtattatgtgctttctattttatgagtgtccgtcttagtcttcttaggctgctataacagaaatatcatagactgggtgccttcaacaacatttatttattatctccattctggaagctggaagtacaagcccagggagccagcatggttgggttcttggggagggtcctcttgctggcttatggacagcagccttcttgctgtttctcacatggcagaaagaggaagtgctggtgtctcttcctcttctcataaggactcatgagaaggcctcacccttgtggcttcatgtaagcctaattatctctcaaaggtcccacctccaaataacatcacaatgggtgtttagggcttcaacatatgaatttgaggggttgcgcacaagcatttaacccgtaacagcatcttcatactttggccatctttctagatctagttgtttcttctacctggtctttccacattccacctacctgccttacagagaaagagccttgtagctgagagaatgtctcagaaagaaaaataggtccaccctagctgttttctcctgttgacttgtccctgcacctcccagcactgatgctcctgggagctatggatcctggcatttaaagggatccatggagccaacatccaactcttcatggcctccaatccctgccacacaccctcacacccacataaacagtttaggggcttattccaagctcccatttacacagacttcccataatactcaacagtgtgatgagccaaataaggtaggctctgaaaagttgaatctgtgtggccagtcctaattctgcactggtagcttgaaattggccaaggcaggtgcatttacaccacttagtgtaagtgccccaaattcgggctttagttttccagaaagccagtttaccagctcacctctgccaatacccacattttctaatggaggagaggagaggaaaggggaggggaggaattttctaaataagagaaattatgacgttatcttttgccacttcttctgtgctgtctcaaaacttcttccgactttgtaacatgttgatggaaccttttcttcattttcagtgcagatgctgtgttttcctaatcttcatgaccctttggtaatttaacttggtgtctgaatgcggggtagggacgtatctttgaaatcatgttgtcatatatttcagaagtccttgtgacatgtcttcattccattatctatgcaaatcatgggcagaattacacagatccctgtttgctgctttaattatcccttctcagccaaatagcacttgctctgccactaatgattctaatctgaactgggaattgatgttgacaaaacacaagctgtttagtttttgcaaaggcttatcaaatctcctactgaaaacagaagttttactggatatccagaatcgaagccccatttattggaaaatattccagctgataagcaagagagccaataagaaatatccctgggaaggcaggagggaattcacaagatcataaaaatataaccacagttacatcactgagataagagctaatctaagttataaggttgtcccttgtgaaaacatgacaaaataataattaagtgtacatgccttgcgaatgttctccactgttaaaatagcgcctctatttagggcagcttgtaaagggaactgggtatgtttagagcttagaaaagcatacagttggaatatgaaaaaaagagagagattatggcaattttgtaaatcaagaagaatttgtagtgggagatagggagccactgaaggtttttaagcaggaaaacaatgcaataaaagatgtaattaaggaagattagtctggcagtattagggcaagatctatcttaagttccttataaaaaacaaaaatagaattagtaatgagttaaccccccaaccccaccaccaaaaaaacaaaaaaaagagagagagaggaaaagcatcaaatctcttctacttttcgtaggcagttaaggtagcacatagactgggaagtactcaaagagtcttgcaaaactttctcagcttattaagttaaattacttctttgctctcatttggtattcatgaatgttaaaacaagttccgtaacagtgcactcaaagtctccaggcagtccagggacctcttgaagacttcttttcatgctgttccattgttgcagccaatgagcactgtcagccaacagcccacatgccatctgatcctcccattgtcctgttttcagaaacagtttaaatctcatccactcttatgaaaatgaaggaataggggcccatgtcttctaattctcattcaagagtcactagactgcagtaaaaatccaaccaatgataccacaatgactcagggctcttgtaggcttagcacatgaaggaaatggacggtgccaattgtgacagagttcatccaaggaacagatacgacctaaaagacaccagccaaactgctatttctcaaaaggacaatgttcctgccttgagtgcctgtcccactttgtctgcattgtctgcctcctacccaagacccagcgaaagtttccccttgttggtgaattctcagattctccagctcatagcaatccttgaccttctgaactatcatggattttgactagaccacaaaattgcattgagcttatatatttcctaaatggttatttcttttcatgtgtaaattctctctccaactacaataaaaactccttaaaaagagaaaccatgtcttacatgtcatatgtcatccaagttcagtggcataggaagaagatggagatattgaggctgaactctgtctccaaaatcctgtgttccaaattatgctcaccatggtgaagatgtttgcaagtctcccaagcctcaaaccctaccatttatttttcagtcttagtagatgtccttgctttcctttgtttttcctaaaaaaatagagttcacacaaattaagttcccacaattcccttccactccacttcatgatttttattttcctcctctgcttttttcagaagaaggcttgtttcttcttggcaaaactggttgcttccttttggaatttgattcaacagttactctactttttagcccagtatcttcaatccatcctgcttctgctataaacatcacaagtttccctacttttttctttgttagcatttttactgttttccttagaaaagctttccccaaagccaatttttaaaaatagtatgtactcactcactacttcctctcttctattatctatgaactccttgacttttctcaatttgagttttgataaaagaacttcaagagggttctgatgaaagaactcaagaatgagaaaagtcaaggagttcatagataatagaattaactcctgattaattgaagctgttcccttggaatgtccagttcaagctcagaactggaatcctgtgtttaactcccctgaacatggaaattaatcacccagatccgccaccaaagaggacttcctgtgcatacatggggcatgtggtccaccagcctctcccagctgtcagctctttcagaacctgctgcagctgggccgcctgtctaagatcacagctttctcaggcagcccacatctaaggtggccagatgaagcacaaaacacccagttcaatttggcttccagataaacaatggatagtttaattttttatgataagtacaccacaggcaatatttgagacatactcctatttttaaaatattcattgtttatttgaaaagttgaactgggcattctgtattttaacttgctatatctggcaactctacccatccaatgactcagtgaggtaagagcagaagggccaggaccttcggacccaaagagggtcagctgtgttgggcaacactggctccagacctccatgaagggttggcaaagctttgtcccaccagcattgcatttgcctttttcttctccacaatcctgcttccttctcttccttaggagggggataaaccactaaagcatctctaaaccatactctgtcttagcatctttgctcagggaactcatcctgagacatctctcctgagacagggaactcatcctgagacatctccttttaaatgtccacagaaagataaaatgaggtataatataatttgaactccagaaatcaagggaggggaaccagcaggaggtaataatcaggcattcctctaatctatgcatgtgaaggaaaaagcattctgggtaacaaatgaacagtattcccagaagaccaaaatatgctaagtagaaaacaactggaataattagtaatcaaagaaaagcaaataaatatcattgaacgatcatttttttacccaaaaagttggtaaaaataaagaaggaatatatccagtattgttgagtatatgataaagtaaccaattgtatgttttgctagtaaaagtatgaagtggtagaagctttctagaaggcaaagattatatcatgtacatatccttgaatctagggaatttatgcctagatatttaacctaaggaaataatcaaacatatgtacaaccacatatgaacaaaactttaaaatctcaaaaaattaaaaactaccaataaggaatgggtcaaataaattatagcagttctattacaaccagaataacttgaagtcattttaaattaccatttgtgtatattcattgacatggaaaaattttatgatatattgttatatgaaaaactgatttcatatttatatatatgatgtcccatttttgtttacaaaaacacagatttatattttttgaaaaataattataaattttaagtgcttatatttgaatggtggtattataagtgtttttttgtaatttgtaattttttctatgataaataatactatttgtatgctttaacaaatactttgctctacactatatgcaccaaagccttcagattttttcgccttgacgtcacctttttattttttcttttttacctttctgtaacattttatatattaaatacttaactctctagaatccttttccaccttcttaaactctcttccttagttctttttccttttccctttatgttgatatttcccaatattgtgtcatcagatcttttctctgttttctatctgcatgacttacattattgtctatatgcagataactcaaacatctgagtctcagcaacactgacgtccctcaagagcatgtgaaaccctagttccaaatgcccactgacttctagattcaaacatttatactgcacctgctatgttcgggaaatagagtctagagaagaggctgcaaagacaaggagagcccacaaatctccaccaagaaacactggatctgccaatttcaaaatatttcaccttttcccaagtcaattcttcttcctgatctttctttttctgctaccagcacaactatcattttagttgcccggccatgcctatagcagtaattaattaattagctcacttagcaagtgagggatctgataaaatagtggtactcagactcagctatgtatgagaatcacacaggaagcttcaaaaaatactgacgcttatttcccaccccagagattctgatttaattggtctggtatcccaactgggcagtaagagttttatcccctccccaggtggtttctaatttcagcaagaattaaaagtcactgtgctagacacagaaagagcagcatataatgactgattgtgtgatgggaggaaaacagtcaaaacttttttaaaaaatacacttacttcttagtgatatcatctgagttaaatatatattccctggatggcagaagctcaatcagctttcctagtgcacttgtctctttattcaactcaactccagcctttataatatttccagaatgcatggagagaatatagccatactgtcatttaggcattcccatgctctgacccacgcagtctttgctgttattgttccacacacacatcagttaaacaggactacccattgctccctagacattgtctccaatctaactctgcctttgcccttactattcctcccaccttaaccatccttcactcccacctcaatcaatcacaactccaccaatccattagctctaacgattgatggtgaaccaaccttgatagcatgcccctctgtatgcccaggagtaattcctcactctccttaactccaaagcaccccttattatacttaacaaactctgtctatggaaaagttatgagtaccctcatcatatacttccaatcagattttaagctacctgaaggccaaaggtaagatctcttatttctacgtacaggaatgaaggagggaaagctgagggctccagagtcatcctgcctgagtttatacccaaactctgccaatcatacacagagtgtgtgatgtttaggcaagcaacttaccttctgaacctgtttcctcctcctttgaatgaagataacaataggacacacaagattgttatgaaggtaaaataaataaataaatatatatatttatatataatttatatatattatatatctatataattatttatatatatttatataatttatatatattatatatttatataattatttgtatatatttatataatttatatatattatatatttatataattatttatatatatttatataatttatatatattatatattatataatatatatatgtatatataaagcgcttagcacaataattgctccaaatggcattgatgatgatgggaatcagtgtttgggagtctaaactatatcaagaaagatatttggttgtgaaggtgacagcatctctgtgtagtaaacagaaggcaaataaagctcttggatttggaaaatgtttattatattttctaacattactccctaggacaactcaagttattattgcagtttcaattattccagacagttagtcctgcttcctgatagtatgtaaatttcccagcttggtgccatctctaaggttctaaatttcattttgcactaacagcttttccgaaaactctgccactcggagacccctgtgtcctaaatgctgtttctttgtggagtacaatgtttttaattgggtgaaacagtgatggagagcgtgtcagatttccatgcaggatacactcatttgtgaagcatgcaatcccgctgttaagactgcagtgaaccaagagagcaacaagctatttctacctagtgggctgatagcattacagcctctggatctgaaatgagatctattttaaatttaattcattttctgagggatacgtaacaagagcctcttctgtatgcacctgaaccaaaagaccataagccatactgacagcgaggcaggggaatgtgaggacgcagaggcagcttcctcagggactccctgttgccaggctgccatctctcccagcaaaaacaatcttgctgttttttatgcccacttgaagtaccagagacataacaaagagtgcatcagtgtgtcgaagctgcaaacaaacggatcatctgctcttagagtggctctgtaaattcttttctctcctttatcaactttcctctctgtggtggaaccttcctatcagcactgaaacatgttcaagtccctcttatctttaaaagtaaaaataaaacataaaaaatctacccttggtcccactccctcctccagggactgctccacttcctcatccccttcaaaaggcttgaacctgctctctacattcaccgtgtgccttcctcatgcctcatgcatatttcaaaccacctcaacacagatggcttccaaatcttcatcctctgacctcatgagaaccatgctgaggtcactaatgacttccaggtagctaaatccattcctcagcttatgtggcacaattaaccaggagcttcttcttttcaggagcgcttgatcacatccaattaccaacgacccctcacttgatgtcctcagcccacccagacctcccctctgagtagcccatatccaaatgctgactccatctcttctacctgcattctcaaaatctctgcaaaacatcttccaaactagctgtcacctccactgcttaagtgatcacaccagatacccaagagacatccttgacccttcccttgctgtggtccacgctaaccattgcagggcccagaataagaatatgtgtggcgctcatatgcatacgtgtagcttttatgtttgtgtaaagaatcagtgtcacacttcattcatgttgggtctaaaccagagtcgcatgagttgtaaagtgtagcaaaatatccctcagctgccatgcaaaatcactccagagaccacactaacttaggagtatcccagcgctaagcaaaacaatgaagggggatactgaacacattgagaaattgcacttcgtttcactcatgtaatagactagataaagattttgacaagtccattaattcatcttttcttttatggaggcatttgctctgctcagatccttcctgcactggagagcagtgttagcaacagcacaagccaaagtctccacaacatttagatactttcgtatagaggagccaggttgaagagatggagagaagcgtctccctggaacctgggcagtcttagtcttgaaagtggatgtctaaggttatgggtaagtaacttgcctgggctgagagacacccatttgtttatttttcttttttcttttttttttttttttgagacggagtctcgctctgtcgcccaggctggagtgcagtggctcgatctcggctcactgcaagctctgcctcccaggttcacgccattctcctgcctcagcctcccctagtagctgggactacaggcgcccgccactaatcttttgtatttttagtagagacggggtttcaccatgttagccaggatggtctcgatctcctgacctcctgatccacctgcctcgtccttccaacgcatttgtttattaatacctttattttttgtgagtgtttgtgaagtgagtagtcctctacaacaggaattggcaaaattttttgtacatattttaggctttccaggccagaaaggccactgtagcaaagaagtagccacagaatgaatgactgcagctgtgtttcaataaaactttatttaaagaaaaaatcaggacaggggccagctttggcccatgggctggagtttgccaatccctggtataacatataaggcgcagagtcggatctcttttgccccaaactaaggatagtattgccttcattctctgcttctaataaattatcctgttctactttacaccttaaatatgtttcaaatccatgcacttctgaacatttcaccatcaccaccctgatcaacactgcttttatttcccacgtgggctgcatttcggaatagcctctcaataggcttctcatttcattttcactcacccactctcctacctcacctctgcagctaaggtgatttttctaaaatgcaaatatgaccacgttgcttctcaactaaacactttttcgtactgtctctgaaaatcaaagccacagtttcaacaaaatctatcagcccctcagcagcctcaacaaaggcctcccttcttctggccccctaccctcaagccgcagcgacttggttcacatcttcagatgctcaagttaccttccttgccgcatgctgcctcctcaccttgaaaaactgttgctcctctttatctgggaaattcttatcctttgcctggggctcctctaagaagggaatttcttggcctcccacatcaagcctggcatcatcatttttttttcaactacttaccccagtttaaaaaaaaaaaaaagaattgcttaagtcatcaatcgctgaataaagtacaggctcaatgaggacagagcaataccctgtttagtccattgccaggtgcacccaaatcaagaacatcttattatatgaggaggagttaaagaaatgagaaatggagatgggggtagtagaaggagaaggagcaggcaccaaacagggaggagagaagacagggcgagtcatgccttcaaacacatcaaagtgttccaggtaaaagtggccacaggcatagtctacatggcttcagacagagatcagcatagtacccacagctggaagttaatgtgaaggtttaagcctggaacttttaagaaatatctaggccgggcgtggtggctcacgcctgtaatcctagcactttgtgaggccaacgcaggcgaatcacgaagtcaggagatcaatactatcctggctaacacggtgaaaccccatctctattaaaaatacaacaaaattagtctggcatggtggcacgcatgtgtagtaccagctactcgggaggctgacacaggagcatcgcttgaacctgggaggcggaggttgctgtgtgctgagatcacgccactgcactccagcccaggtgactgagcaagactctgtctcaaaaataaataaatatctaatgattaaaactgtccagcagcggaacaagctggccttatcgtgacagcctccctaggactgtgctgtgagaggaaaattgtacctgtaggaccagaaaaagacttctccctcctctgtctctgacggcttttgcaggagcaggctggcagttctgctcaattcttttgtttgttgctgtaactgttattgttatggaatgtccacctaaaaactaaaataggacacatacaactccagtccttgcagtcgattcttcaccctgtaaaattacatactttgttgtgggtcagattgcgtctctcaaaaaaaaaaaaagatatgttgatgtcctaacccccagtatctcagaatgtcatgttatagggggacagggcctctatagaagttatcaaattaaaataagttaattgggcctgcaatcccagcactttgggaggctgaggcaggcggatcacctgaggtcgggagttcaagacaagcccggccaacatagtgaaaacccgtttctactaaaaatacaaaaattagccgggcatggtggcaggcgcctgtaatcccagctaccaggaggctgaggcaagggaatcgcttgaacctgggacacagaggttgcagtgagctgagatcatgtcattgcactccagcctgggtgacagagtgagactctgccaaaaaataaaaataacaaaactaaaatgaggtcattgggatggggtgagtcctaatccaatatgattggtgttcttataaaacggggaaatttgggtgcagacgcacagggagacacacacagagggaagatgaggggaagacgcagacagaacaccatctaaagccaaggcacccctcaggctaccagaagccagaagagagaccagggacagattcttcctcacagccctccagaggcaccgagtatgctgttacggaccaaattgtgtgccctcaaaatttctatgttgaagctccagtccccagtatctcagaatatgactgtatttgtagatagagccttagaaaaaggtaattaagttaaagtaaaatcactatggcgaaccagtctgactggtgtccttatcggaagaagagatgaggacacctgagtgacaccagggatgcccatacagagagaaggccgtgtgaggacagtgagaagacagccatctgcaagccacagagacaggcctcaggagaaaccaaccatgctgacaccttaatctcgaacttttagcctccagaactgtgagataatgcatttctgttgcctatgccccccagcctgtggtattttattatggcaggcccgggaaactcatacattttcccacagcactactttggtacatgttgctttaaaattgtattaaacgtgcattttcccatgaacaatatataatattgctttggacatttcttgactttgtatggatggcattgcatcatgtgtatccttctcagcttgctcttttgcttaacgttatttttatgagattcatccatgtgcattcatgctgctgtcactggtgctttttcattgctatatagtattccattttacgagtgtgctacagtgtatttacccatgccatgatgatgggcttttagactgtttagagttattcactatcacagacaatgctccaataagtattttctcagtcccagtatgtaagtgggaaatggaagtaaaggtgaaactcagttctccttccagcatgatcaccatataagctcttaaaaaaaaaattcagccaatcaaacaacactgacagataaccctgttccaggcagccactgacatggaaattaatgcaggacagaagatgcagtttctactagggagagtaatctttacctacaacaaatatttactgaaagatcattctggggaaatgacttaaacaaggcattgagaatataaagatgaataggacgaagctcttgctttcatgggcttcacaatctcattggatggttccacagacaacaaaaagggtgaacactagggagcagcttacactaggaaccagatgagtagtgtgggggagcagtgctctgggaaattgggaaaactcactttgggctgaggacaaggtcttcataccggacttgaagatgactagactcagagaaacacagagaaaaagggaactaccccatgtgggagttgctctcagtagcagagattggaaaagcatgtggtcagcttagcagacagtagttgacaaaggtgtttgtcaaggagttgtaggagagagatttagaggttgaatggggcaagatatggatgcctggggagactgtgcctgatcctctaagtaaaagggaactttgtggattgtgcttaatcctctaagtaaaagggaactttgaggattacctatgaaatgttgaatgcccactcctaagagtgtgtgaagagagggcaaccactgtgttcaggagatgatacagagcccatttctacaacaggatgaagttgagctacctcacctctaagaccctatcctctgcatctagctcccatttgtagaatgaatgtattatgacgaatgaacaaaaggcaacccagtagatggtgtttaaatacgaaggctccagacttgggctcaaccctcatcctcaccatgagtgtcctttctgagcctctgttcccccttctgtacaacagcgaggataaatgtatagacacctgggaccacacaggcagagtccctggtgcagtgctagcctgatgaacgttcagcaacacgatggcccttgtgaggttgaagcaccactttagtaaggcagatcagataggacctttgataataacacctaccacaacccattttatgatgcttttatttcaaagtgtttccatctcaaccatcttatttatttcaacgcacaataccttgcattaggaacgccttgagaacttttagcatcatcaaaatagatacatggtatgggatagaatagggcatgatccaaattcttcatgaatttaggaatccattttggattcccttgtttttggaggttcttcagaggcagcaaggtagctcattagccaaactgtcaagtgcacttaatttttttttttttttttgagatacagtctcactctgtcacccaggctggagtgctgtggcacaatctcagctcactgcaacctccacctccctgattcaagcaattctcctgcctcagcctcctgagtagctgggattacaggtgcacaccaccaccacgcccagctaatttttgtattattagtagagacagggtttcaccatgttggtcaggctggtctcaaactcccggcctcgtgatccacccacctcatgatccacccgcctcggcctcccaaagtgctgggattacaggcatgagctaccaagcccggccgcacttaatttgtcatcctgaaacaggagaaaaatctccaggaggtcttacttcctagtcccagctctgctcatcactggacaaactgcttttccacatctggaaggaatgggagaaaaactatccctcaaaactcactagaatctgttctaataaggaagactgtcttactcatctttgtatgttcagaggctagtttggggcctaaccaggcatttgtctgggacatggtatggcccagactcaagagcacaggctttggaatcaggtagccttgagctcacaccagggaatagtaggccactgccagcaatgagcctgtgagcaaatgacctaaccactggtcccctcactcttctcatctgtaaactgggccaataaatttgcaaggccagtgaggattggtgctcaggggtgcaacaaacccagcacagagaagccacactgctgattttcaagcctatggcttagagaagattttccccaaatagatttttctgagcaccatctcagattcgcctctgctgttttaagcataaaatgcagattcagagctctgtgcaaacctactgaatcaaagcagagattagctttcccattctgtatttttaggaagctctccaggaaatttgggtatgcactcaagtttaagtgtaaggcctgatttaggttctattggatggataaaccgctcctcccagtaaattattacacctggcttttactctcaggcatcaggaaattgggatgagaagctcctgcttagaggagatggcaacagccctgtcaggggcttcaaacacagttaacactgtaggaaagacagacttgggaagcttccatggagacctcgaagatcccctgacaccaggcaggcagcatgaagcacagagatgcctttgcctcccagcacaccacagattggcagtgagcttcacttgaacaaggccatgcaccttggtaatgttctcctcatttccacagacctcagccagccaaagttcccgtgctaagcacagagacacctctcctccctttatcttaacggggccaagttcttcaggcagagccaatgatgcaaaaaagccaaacacagaaacacttaaaggcataaagcaaacaccatttttagcagaggtttcctaaaatgacaagattgtttgcaacattttttgatgacagcgatgatgatgacaaataatccaccgtcagtaggaagctgagcttttattcttccattttgaataacgtccactttaaaaggttagattgctctgcagtgaggttaaaaccattgttattcctcctccatcttggaatagataaaagagtatttctgaagactccaagaaggttgttagagcaagaaataaatgttgtgtggattttccaatgttgttgagcaaaggtgaactactctagaagcaagtggaaggtcaggatgtaaatctctctagctgcagacgtatctaaacgttagtatctacggaaggtcaattgattgtctgcgagttcaaaataaatgggtcatattctcagtggctcctaaatctggtcttgcaagaccttaaagtttttccatttatttgaaagagtgggagacagtggtgtttggtggttgaagagggtgggggatgtttgctgatagtactgacaagcaaggtgagcacagtcttttaaagtggcacattttcaatagctttcagttgaaatgttggtgtgaaagttattaagagaatggtgataaaccattaggggaagcagtgtgaaagggaggtcagggtattcaatacgagcttgaatcataggggtcaaataaggagacacacagagaaacaggcacagctgaggctttgtaaatgtgctctcaccctggccaatgcccagcacaagcctcagggtccactccacctcagaagctgagggtgacacctccttacaaaggcttggtactcttgatgctaaagccaccttcgacttttaactgggggtgcaaataagggtcaatagcaagaaggagaggtcaaagatactcaaaataattaagcttcctgccactaaaaatttaagccaatggaaacatatttgagatggctataacaggaagagaatcctatcctgggtaggaaattcaaaggtgtttgcccctgggaagatttcatctgtacccttcatatttagaacaccatctacactactgagtgtccaaaagccattctttcttgcattctgaactctgtattctggtctcaatcctttcccatgaaatatagagaaaattcctgaatggaccatccagagaagcatggcaatcccaatgccaattctagtggggtcagcttaggaaggagcacatgaaccagccccgattaacaagcttatcttgctaagataagagagcaagtcttttgggattttctgggagctatttcctctattggaaatagagagatacaggggagaactctctttctctcctagagatcgtcttgtctggatgccatacttggaactgctgaagccattctgagaccatgagaggagccattactccaaaatggaaaatgggagaggtgaaaaacctgcccagctgcccaatcaaccaaccttagagctgccctatttcaggttttcttgttaagtgacataataagttttccccattgcttgtaacaaattgaatttggaggttttgttccctgcagcttaaagtaccctcactgatgcaaaaacatgaacattctcaggttgatggtcagacttcattctgcctttgtctctttaaatacatagttccatcattaggagaacacatgtacaacacccaagatcaaatggagactgcatagaaagaacaggctggcaaacccattggaaagtacagctttctccttgcccaatcttaccaaattgaatgaaattaagaatagctggccgggcgcggtgactcacacctgtaatcccagcactttgggaggccaaggcgggcggatcacgaggtcaagagatcaagaccatcctggccaacatggtaaaaccctgtctctactaaaaatacaaaaattagctgggcgtggtggcaggtgcctgtagtcccagctactcaggaggctgaggcaggagaattggttaaaccagggaggcagaggttgcagtgcgccgagatcatgccactgcactccagcctagcaacagagcgagactacgtctcaaaaaaaaaaaaaataagaatagctaacatgtatttctatgtacattctaggcacagtgatgggcattttacagcaattatctcttttcatcctaactttttagatatctactgatattgttgttttgatgacaataagttacctgggaaatattgataatcattcttgttaatcatagaggattatttaatcctttcatttaaatgccttatgcaaagtatgtacacattcattctgacatttgattttcccagttttttagtacatgaaaattaaagctgagagcacacaactggtaaacagggaatcggaaattgaatcttgacctcacccagtactcttctcactttaccttatgtctcccatacactgccattaacagggtccaattatttaaaagctggaataaaaattatactcttgttgtggcctaaagccttgctactcaaatatcacctgaaagcttgtgataaatgtaaaatctcaagcctcaccccagacccgctgaataagaaactgcttttcagtaaaattcccagtaattcaaatgtacatgacagcgtgaggagtactgggctagagggtgcagccctcggaagaaaggaaggcagcagtaattacagaatgttagtctaagagaactcaagaaagaccatggaggtgacagcaagtgtctgtggggggccggcatgggctgtctgtgcagtgtttatatgagtttggtagtcagtctcctggcaaaagttaatctagttgctttgtgttccaaataacagaagagtcatcttggcttaaacattagttcttacactgagtagctgagaaacacacttctgaatacaaacacaagataaatcaagagtaaattgaattcagcacctggatccaaccagtctagcagtgagccaagatcgcaccaccacactccagcctgggtgacagagcaagactgaaaaaaaagaaaaagaaagaaagaaaattaacaaaaatactaggacctgaactcagctctggatcaaatggacctgagcgatatctacagaactctccacccaaaagcaagataatagacattcttctcatcatcacgcggcacttactctaaaatctatcatataatcagaagtaaaacactcttcaccaaatgcaacagaactcagataacaaacaatctcttgaaccacagtgcaatcaaattagaactcaagactaagaaattcactcaaaaccatataattacatgaaaattgttcctgaattacatgaaaacaggttcagaaacctgttcctgaatgacttttgactgaataatgaaattaagacaggaatcaggaagttctttgaaactaatgtgaacaaatatacaatgtaccagaatctctgggacactgctaaggcaatattaacagggaaattttggggtttttgttttgttttgttttgttttttgtttgtctttttttttgagatggagtatcactctgtcaccaggctggagtgcagtgacgtgatctcgactcactgccacctccgcctcctgggtttaagtgattctcctgcctcagcctcccaagtagctgggactacaggtgcccgccaccatgcccagctaatttttttatttttagtagagatggggtttcaccatgttggccagggtggtctcgatctcttgacctcatgatctgcctgcctcggcctcccaaagtgctgggattacaggtgtgagccactgcatctagcctaagagggacatttatagcactaaatgtccacatcaaaaagttagaaaggtctcaagttaacaacctaacatgacaactattaaataaaagaaccagagaaccaagaacagacaaatcccaaagctagcagaagacaagaaataaccaaaatcagagctgaactgaaagagttagagacacgaaaatctattcaaaagatcaacaaatgcaggagcttgttttttgaaaaaattaataaaatagacggttagctagactaataaagaagaaaagagagaagattcaaataaacacaatcagcaataagggggatattactactaactctacagaaatacaaacaaacatcacagaatattataaacacctctatgcacataaactagaaaatctggaagaaattgataaattcctggacatacacacccacccaagactgaactaggaagaaactgaatccctgactagacaaataatgaattctgaaattgagatagtaataaatagcctactaacaaaaaaaagcccaggaccagacaaattcacagctgaattctaccagatgtataaagaagaggtcgtatcactcctactgaaactatatccaaaaattgaaaaggagagactcctccctaactcattctatgaggccagcatcatcctgataccaaaacctggcagagatacaacagaaaaaggaaacttcaggccagtaccctttataaatatcaatgcaaaaatcctcaacaaaatactggaaaccaaatccagcaacacataaaagcttatttatcatgatcaagtaggcttcatcctgggatgcaaggttggttcaacacatgcaaatcaacaaatgtgattcatcacataaacaaaactaaagacaaaaaacacatgattatctcaaaagatgcaaaacaggctttctacaaaattcaacaaccttcatgttaaaaactctcaataaactagatattgaaggaacacacctcaaaataataagaaccacaaacaacatcatactgaatgggtaaaagctggatgcattccccccttgaaaaccagcacgagacaaggatgccctctctcaccactcctattcaacataggattggaagttctggccggggcaatcaggcaagagaaggaaataacgggcattcaaataggaagagaggaagtcaaactatacctgtttggagataacatgatcctacatctagaaaaccccatcacctcagaccaaaagcttcttaagctgataagcaacttcagcaaagtctcaggatacaaaatcaatgtacaaaaatcactagcattcctatataccaacaacagtcaagccaagagccaaatcttgaatgaatcctcattcacaaggaccacaaaaagaataaaatacccaggaatacagcaaactagggaggtgaaagatttctacaagaagaactacacaacactgctcaaagaaatcagagatgacacaaacaaaaggaaaaacattccatgctcatggagaggaagaatcgatatcattaaaattgccatacttgctcaaagcaatgtatagattcaatgctattcttattaaactataattaacattcttcacagaactagaaaaaaactattttaaaattcatatggaaccaaaaaagagcctgaatagctaaggcaatcctaagcaaaaagaacaaagctggaagcatcacactacccaacttcaaactatactacagggctacagtaaccaaaacagcatggtactggtacaagaacagacacatagaccaatggaacagaatagagaacctgaccctaatgacattttagaaagagcaagaaatatagtagatagttttaaatattaaattaatgacacagagaagggcttcaggtattctcaatgaatgagaaagacaaattaaagcaatcgcagagtggatgattcatgtagaagaccaagaagatccaactgaaagctaactggggctcctgtcattaaggaccaaaaactgggaaaaaaatatttagagatacagcattgaaaaatttccatgaaatggaaaaaacagaatctacagattaaattcatacaacatatatgggaaataataagtgacagaaaattattggcatcaacacataacctcattaaatgatttaacttcaaggataaagacagaatttttatccctcctgacaaaaaaaaaaaaaaattatagttcagtgcaggagaaaaagtcaggctggcttaagattttaccacaaaaaattcagcatgagttattgactgtggagtgatactttaaaagttacgagggaaataaagtataaaacaagaatatatctagccaagttcattctcaagtataagagcaagtaaaaaactcaataatatgccactcttaagccactgtgggagaagaaaataaactattcctatttctctctctttatggtttctaaatctttttgcctaaaattcaaaaaaaaaaaattgagatctgatgtttagtgcagtgaaaatttcttcagatttacttcgtcttctctttgttcatttaaatgaaagttgaaaccttttattaaagtataaaaacgttaggagaatttcatgccacctaagagttggcaggattactacttggacaggtcgtttgagttagcaaatgcaaagcaaatacatcacatgtcacacaaacacacacacacacacagacattgtggttgtacaagacccaagtgcttacaaactcactagactgtatgtttccatctctaatcagatgttctgtttggtaaaataaagtatatcttttagcaggtctatatcttgctatgaatttcctgacctcatggcttgcaaccaggatggcatattagaatcacctatagagatttctttctttctttttttttttgatacagagtctcgctctgtcaccaggctggagtgcagtggtgcgatctcagctcactgcaacctctgcctcctgggttcaagcgattctcctgcctcagccccccgaataacggaatacgggcacgcaccaccagacccagctaattttttgtatttttagtagagacggggtttcaccatgttggccaggatggtctcaatctcttgacctcatgatccgcctgccttggcctcccaaaatgctgggattacaggcgtgagccactgtgcctggccagagatttcattttttaaaatacataggccttggtatgtgttatttctagaagctttcatttccagtatccacactcactgatttaaagaaaagtttctttcttgcataggaatttagaatcccctgtatctccctgtgactgcgagctattgcagagtcctgtatgttcttgtttacttaggagttcaaagacaaccaggagaaggcagcacagcaatatacagctgtgatcctgtttttctcctttaaagaaacaaaaatggctattttgcatcctgattgaacagcccagaccttggcaaatatattattccatggcattctttgtgagagtgatatcttggagagaataaaaaggtaaggccacccctctgtaggcagaagtggagtctcttctaaaggaaatgagctgtcagtcatttaaaagagatcagtcctgggatagaaaaggaagacttggtggatgagccttaaactggcttagagggaagcttccttctccctttgggggccttccagcaattgagcctgaattttaaggcagagaattgcacagagcttcccagtgaggaagaaaagagtagagagtatggtggttaagagaccctggtgtcagacaggcgtggtggctcacgcctgtaatcccagcactttgggaggccaaggcgagtggatcacaaggtcaggagatctagaccatcttggctaacacggtgaaaccccgtctctactaaaaatacaaaaaattacccgggtgtggtggcgggcgcctgtagtcccagctactcaggaggctgaggaaggagaatggcgtgaacccgggaggcggaccttgcagtgagccgaaatcacgccactgcactccagcctgggcgacagagcaagactcagtctcaaaaaaaaaaaaagaaaagaaaagaaaaaagaagactctggagtctggcagcctggcatcggatgccactccgtacttgctagtgtgtgcccttgaccagtcgctgaagctctcagtgccttagtgtcctcatctaaaaaatgaggatcataatagcacaaagagttttatgaggattaacagaataatacacacaaaatgcttagaatactgcctggcacataataagcacacgataaatgtcagctgttgcttttattacatggagcaagaaggaagcctgataaagaatctcagaattgggctggacagatggagagagatatgagaagtcataatcagccttttggtaaaggctctatcagagttatggttctgtctttgtatcattaggagggaagacttaccccccatctcaccccctgacccatcgccccaaagccaggtggaggcagcgtggtcactagcagctggtcactatgccccacactggtgagctctagcaggtctattaatatcaatgtggcagcatgatgtggtatccagcatcctcttcagaaacatgttaggcacactttcaggaggcctaatttcccataattaagccagcaggggtgttcaccatcaaaatttagacattaaaaggaagtaagttctaccttggccaaaaagtgatgaggcctcaccatttggattattctagtataagtatcccaacacaacaggtgctccagacagggcatcagtgaggaacagcaggtacataacacccagggcctccctgctctgcagtgctgtggtttgggatggcctgggatcagccctcccgccctgtatcacagctgtggaggtgtgaaagcagagagaccagatgccaggagcacttacatgccttagattagtctccgaggacaatcacagtcgtaggacagatgacgatgtgagcagaaagggtgattagtcattactgaaactttggaatactctccagccagtgctaagatgataaaacaacaacagaaaagacctcttttctgctgggcaagcccctggtaacctttgccactgaactaaaagctttcaaagggcgaacagaagagccataaatctcaggggtgacattaaatatttgtcactgaaacacttaagacttgtttcaaaaccattcctttctgaaagtttataacaaataactgggtgacttaacctctacaagagcatctcctttttcactacaaatggaaacaaatggtctataaagagcgggaccctgctgatggtcaattctcagccactgtgtggtctcccagccctgcccaaatgggtgagttgccccttttgtttagattaaactggctcttgcatccatgacatcagggcagcaaaggttttaactggactttcttttaaactgcccattaatcttccctcccttcaccctgctgaaagaatgagtaaagtaaattatttacattctgatgttgcaagaactcttcctacattaagctttcagttgagcctaaacatctttttagtgttttcctcacaacccctccccttatcataactccatagcttctcagagagatcacctgttagactaaaatatgacagggatacaaacctcttcctaaccacctgtgtgtgccctgggcacacataccagagagaaaacgtttttagccaagttccaattttaccaagttccaaatatgacaatcttcattcccagcattctagagtttgctcttcagtatgccataatattccttcggcatctccggaggaaaactgaagcgcatcagaaactttgcaaaagatgttcgttatgcctcttgtcagagtgaggagcaaaggcttttgttgggaagagtaatgtcacctgcatcagctccctctgggctcagagggacaagcagccacctacatggagggttttcaagcatggagctgggaggtggctcaataggacacacacccacattaaagttcccattcaaccctgaaatcccacttcagacaattcacttctcttgtatgacagagaaaaagaaagaaagaaggttcttgtaaggtatcagagtagaaggagccagaaaaggccattgaaaaggaattcataaagcaaggtcagagaatgaggaaagaattggaagcacagaccgtcacaggcatcaggaaacctgggctgcctgcagtcgaaataactaattcctattaagtttgaattaatgaagtaacttttaattagagaaagataaaccaagtaatatctattaggacaaagatgcatttacgaagcatctgttcctccctctcttaatatgctgcctcattcgtttccttaggccttaatttcttttggccttctttacaagttcttagcttcccctaacaagcatttgttatttaaagtcagcacccatataagtcatattttgctgcctcttgcccaaactttgccactaactgcagacgtgtgtcccctgaaaatcacctccaaccattgataatttcagtatgctcccaaggagaacagtgtcacctctggctttgctttggttagtggttaacattctcttgctctgatattttgacaccaatgatgtcctgaggcatgaaggtcccctctgagccttgccactggcttctgctaggaattgccatccctcactatgttctccaacgaatgcagaaggacagggaatgctgttttctggggtccatagggcaccaaagctccctgtaaaattctcccttcttttgttccttttgtacctcactctttcttatgaacaacaaaaaaatgctgcctgtgtttccatatcttactgttattggccaaaaattctttagatttttgctcagacacatcgtccttgttggttcccagatagcagccaggatcaggatacaaatctgagtgcaaagcactgcctggaactcagattcctctctcccttccactgcacatgggcttggcactgggccaagtttttctccatggcactttatggctatcaacttctggtggccagtcctactggtaatgcagacatgtaaattctggcaatagacacagctgagactcaagctggcggacccagcctctgcctcacacacactagtattacttaactcatactaaagtattacttaacttgtactaaaaagccatcaagtctcagctagctcttttgtagcccccccccgcttctttatttctggagaaattcataaatactggctagagaccagtggcatcgggaatgcctgcatcgtttgttaaaaatacagacaccgggcccccatccagagctttcgaatcagaagctctttgttaagactcaagcatctttttctttttaagttcgttcaaatgattctttcagacatctagcttcgcaaagggctatttcagagcgccagtctaatttcagccctgtctgagcacatcttaccctcatcaaatttgacttcttctagaatatcattctctcttggccttcccagacttgcataattaaggcatgttatggcccctcttcacatctgctctttctactagactctctcaaggtgagtctgagctaaagctttagttagtgcttcacccacttgtggagatggagggaggaggggcgtgaggggattcagatactagggtgccaccctgtatctggattcaacatatccagagctgggcccaggaatctttttgttggtttgcaaggtgcctcaagtttgggaaccttagtaggatttaacatggtgatgggtttttttttgttgtcgttgtttttgagtgggggaggcgggggtgggcaagcatgggccaatatatgttagaaacaattatctcacaatttttacttgtataaccaaaaggtttcctcatgataagaaacaaattttaaaaatttactacctttgaaatgcatcagaaaataaagtggattgatagatgagtaacaggatggatatatggatgaatcaggaaatctagtaagatgctagtagtagaatctaagtaggcaggtacatggatatttgttgttgttgttgcttttatttatttatttattcattttgagactcactctgtttctcaggctggagtgtagtggtaccaaggtggctcactgcagccttgacctcctgggatcaagcctaggtcacttcagcctcccaagtagctgggactacaggcatgcgccaccacacccgactaatttattttattttgttttatttcattttattttagagacagggtgtcactatgctgcccaaaccggtctcagactcctgggctcaagtgatcctcctgcctcagcctcccaaagtgctgagattacaggtgtgagctaccacacccagccttgttgtataattcttgcaactttatgtacgttggaaactttttataatgaaatggtgggattaaagacactaggattaaattttgcctcaaaattatattttaactctatacctcaacttaataatgattaataatgactaagttgaggtcatctaatataatcattagatgactgataggtgattgattactccaatgccccctaaatgttatgtatactatatctgaagtaatttattacctatgtcagtaaattaatttttttaaatggtggtagagatgcggtctcattgtgttgtcaagctgagtgcagtggtgtgatcatagcttacttcagtcttgaactcctaggctcgacaattctcctgccttagcctcctgaccataggcatgcactaccatgcccagctttttttttttttttttaatgttttgtgaagatagggtctcactttatttcccaggctggtcttgaactcttggcttcaagcgatcctcccgccttggccttccaaagtgctgagcacaggcatgagccacctcgctgggccaacgtattttgtttaagtgagattttaaaaataaattgtagatgtttattcttgctaaaatgtaaaatctctttctctttgcaccatcttcccctttttatctgtgtatacattttctagtcctaaaactatttgaatagtatcaatcaaaaaatatatatgaatattactgtgaactaaatgtactattatgttattatgaagatgtaaaaaaagctacaacttcagagcaaagttgttaacagaaagtgttactgcagtccatgtagtaactttgacaagtttatattcaaagttgaacatttgctgctgaggaaatcgagccgggagaactaatgacatatttaaaatcatgtaactagtgggaaacccaaacaagaacataaatctttgttgctaaaataaattcactctaaaattatgctcaggaacaccaatataagtgactttaaatgggggtaaaaattggtgtacttaaaattattttccctattagtcaataaatggtatggggacattgataaagttgcatttctaactcagtcttttcaacaaattaaatccttcttaaagagatttaaaaatgaaacataagacaagtcataaactggagaaattatctgcaaataaaatctaatgaaggacgtattcataatatattaagaacattcaaaactcaagaacaagaaaacagaccacccaatattttgtaatgggtgaaagttctgaacagacattttatcacagaagatatacagatgacaagtgtactaaaagatgttcaatgttatttatcattaaggaagtgcaaattaaagccacaatgagatagcactactcatctattaaaatgactcaaaatgaataagtaggtaaacaaataacttataatggcaagtgctggcaaaattgcaaagcaactggaacccacttagctatctggcaggaacgccaaacagtacagccactctgataaacaatttggcagtttcctataaaattaaatataaccttactaaacgagcaagccatattacccctagatatcaatccaagtgccctagatatcaatccaagtgaattggaaatgtatgttcccacagaaagctgtacacaattgtggatagaagatacattcataaatgcaaaaaactggaaacaacctagaccttgaatatgtaagtggataaacaaacagtggtacatctatacaatagaatactctcaacaataaaaaatattaaattgatttttacatccgagcaaggtggagtaacagagactgaatttgcccttccacatgaaacaaacaaacaaatgaaaacaatatatgaaaacaacagtttgcaaaacactggacaccaaataaggaagaacaatgatctctataagacaagggagaaataaggtaagccttacgatcaacacaacttttttccttgagagtttccaagcaacgacacagagcgaaggaactcagttagagtccagtggactccctgagttgaagacacagagctgagaattcaggcaaaccaagacagctagaattcccaagacagagtagagtagaaaagacagctacaaagagacggaaatgcagagatctgcagaagattcttgtgtagtattcaggtgagcaatcatcaacaaatgcctgtgaagaaaccacctgaggctgaggaaagacccacctgaaaggattagaagaaacagtgactggtactcaagcaggactatttacatttaacatgttattgatgtcggtgggttttaatctgtcaccttactatttattttctatgtgtccgtattttctttttctgcagaaaaactcttctcctgccttgttttggattagttgaatatctttttatgaattcattttaacaacattggttgcttattggttttctttgttattttagtgattgttttaaagtttatgttatattaataccgttttaacttaccacaatctagctgtaaaaatggggtgctacattgtaccactttatgtacagtataagaaccttccaaaaatatacttacatttcttcctgccaatttttgtgctattgttttcatacatgctacgtttatatatgtagtggatctatagacaatttacaggcagaacttgcatcttatcaatattgactcctcaaccaattaatgaacatgtacatctctcattcatttaggttctctttctactttcttagaaaagttttctagtcttcaccagtctttcacatcttcgttgaactaatctctaagtatttcatagtttcgatgctactataaattgtacttttggttataatttctgattgttgctgttatatagaaatacatgctacttttatacatgtattgggtctgtagataattcagaggcagaacttgcatcttaacaatattgattcctcaaccaatgattaaccccatgctacatggttgttcttttattgaaataattatcttttatacagttttaaatagtaagaaaatacatatttaccagtatagttactatttcctgtgctcttcgttcctttatgtggatccacatatccatctggtatcatttttcttcttcctgaaggaattcttctcatttttcttacaatgcagatctgctgaaaataaattattccagcacttatatgcctgaacacatttttattctaccactatttttcaaagaaatgtttgctaggtgtagaattgtaggtgaatgttttttgctcattcgtcttttcaatagacatagaaaaagtttttgacaaagtctactcctcattaaaaaaaaactctcagcaaactagaaacagaaagaatccttctcaatctaatataagacatttaaaataaccaaaaccttacagctaatatatttaatagtgaaaaactgaatgactagccctttgaaatcagaaacaaaacaaggacgttctttcttaatatttcttgtcgacatcatactaaagattctaaccagtgcaacgagacaagtacaagaaattcaaggcatccagttcagagaggaagacataaaactgcctttattttcagatgacacaattgtcaaagtagataatttgatggaattgaaaaaaaaaaaactactagaactaataagagaatttagcaagactacaaaatacaagaccaatgtaaaaaaaaattgtatttctatataacagcaacaaacaatcagaaaccgaaattataaccaaaagtataatttatagtagcatcaaaactatgaaatacttagagattagtccaacaaagatgtgaaagactagtggcaactagaaaacttttctaagaaaatagagaacctaaatgaatgagagatgtacaggttcattaattggttgaggaatcaatattgttaagacgcaagttctgcctgtaaattatctatagatccaaagaaacctgaataaaaaattccaaaaagtgtttttgcagaaattgataaactaattctaaaattcatatggaaattcaaaagacctgaaataggcaaaataattttgcagaagaagaacaaactcgaagactaacgctacctgattttaggaattcttataaaactacagtaatcaagacagtgtggtacaggtgtaaagataaacaataaggccaaaaacaaatagagaaacctgaaataaacctacacatagatggaaatctgatttttgacaaaagtgaaaatgcaattcagtggagaaagatggtcttttcagcatagtaaataaacttcaatccacaccttgtaccataaagaaaattaactcaaaatcatccaaaaattaactcagagacctcaatgtaaaacctaaaaccataaaacattcagaagaaaacctttgtaatcttgagttagacaaagattttttccatacaacaccaaaagcatgattcatttaaaaaagaaacagatacatgagatcttattagaattaaaaacttttgctttttaaaagatactgttaagaaaataaaaagacaagccacagacagactaggagaaaatatttccaggtcatatatctgataacagacttgcattcgaaatattagacatctcaaaattcagtaagaagaaaacaaatttttaaaaacataaacataagattcaaacaggcaagtaaatccctgaaaagatgctcaatatcattagtcattaggtaaactcaaattacacacagtgaactaccattatataaccattagaatggctaaaatttaaaagcattgaccatatcaagtgttggcaacaacatggagaaattagaactttcatgcattgctgataggaatgtaaaatagggtaactactgcaagagtctggcagtcacttaaaaaggtgagcatacacctaccatatgagccaaccattccacttctaggtatttgcccaagagaaacaaaagcatatatccatgcaaaagactagtgtgtgaatgatcctggtcactttagttgttgtagccaaaaactgtaaacaatgtccgtcaacaggtgaaggataaacagagctagattcatacaaaggaatatttactctgcaataaaaaggagctcactggtgaagcatactacactatggttgaatctcaaaataattttgctgagaggaagaagccagacaaaaaggagtgtatatccatacacatagaattctagaaaatataaacttatctgcaatgatagaaagccaggtggttgcttagggaggggaaatgtggacaagggcatgagaagtaattgcgaaggtgaacaaagaaactttgacagtgatagataatatgtttattatcttgattatggtaaaggtcttgtgtatgtatatttatatcaaaatttatcgaattgaacattttaaatatatgcagtttactgtatgtcaattgtacttcaatagacacgttatttttaaaagaatgcactattgatccactcaacaacatgggttaatcttaaatgggtattgctaagttagagacgtcagaatagaaaggctatatactgattggttctatttataagacattcatgaaaagacaaaattgtaggaatgaaaacactcatcaatgatggccaaagagggaggttggttgaggagtcaattacaaagaggcagcacatgagaattttggggtcagtgtctcctgcatggtgtttgatatacaactctatggagtttggaaaatctctcaaatttataaacattcataccttgtaacccagaagttctatttctagaaatttattataaatatgtctaaataagaaataaggttactcattgaagactgtttaaaatagcaaaaagttaggaattgtttaaatattcatcagtaggagcctgactaaatcaatgatggcatattcacgcaatggaatactgtgaagcctttaaaaataagagagtgtaagaaaccattttcaagaggcacataaggtagaggacaaagcatataatgggctaccatttgtgctttacaaaaagaaaaaaaaaggcatgtgcttatagtttttgtaattgcatagaacatctttaaaatgatatagagtcattgcttggtatctatggggattagtttcaggacactgcctccccgccaataccaaaatccagggacgctcaagtcccttatataaaatggcatcacatttgcatataatctacacacatccttcgatatactttaaataatctctaaattacttataatgtcttatacaaagcctacatatcacttcctttgtgtggattcaacgtagtacccagtgtgtaccaaattcaagtttagctttttggaactttgtgaaatcttttttccaaacatccttcatccatagttggttgaatccatggatatggaacccacagatgaagagcccacagatacggagggcccatggaataagaaagaggtgagagtgtctgccactgaaaacagaaactgagtgacttggtgaaaggggtgggacagaaattcattaacaccatctattaactagtcaaaaaattaattaactacttagatattccttacctgtattaaagacacagaaaaagaaggttctgtaggaacatactcaaaacaatagtaagaacatatatgacatacgtatttgagttatccaggcaagagccacagctgacggtggagaagctaagttagaaatcaaggacttcagaatatctttgaatactctgaagttacagccctaaaatgaagcagcaagatgcatctgttaatagaattcctgtctcagaggtgccgtgctgccatccaactggcactgggagtctggctttattgatagatggataagattgaacatgacacctgtgtccagtgaatcccctggcgccatttaactagcacttaaagcagctgcttttgaaaaattaccttcagactgggcccaccctagcagaacaaaatcctcaccttaagtacttttccagttcccaataaatgaggatttttgccctgcaagagaactgagccatattttatttgaagccacatctgtcactttatttttatttcccctgctgtctaccttagatcacaatgcctgtgtcatggcaatatccttccaagggatcacagcaaccccctctttgaagaccttacttggctgctcattgcccgtaatataaagtcatgttcagttgtgtttacaaggcctattacaatctgctctcaaaacacaatttcagcctgatctcgccagcctcgtgcctctacacaaaactattggactttctccagccacgctgtaatcttctgcatcttcaaaccattgctcgttcttctctcttcattatcttcttttttatttatttatttattcatttagttatttatttatttatttggtgtcggagtctcactctgtcgccagactggagtgcagtggtgcgatctaggctcactgcgacctctgcctcccgggttcaagtgattctcctgcctcagcctcccgagtagctgggactgcaggcacacaccaccacgcccagctaatttttgtatttttagtagagatggggtttcaccatgttggccaggatggtctcttatctcttgacctcgtgatccgcccgccccaacctcctgaagtgctgggattacaggtgtgagccaccacacctggcccttcattatcttcttaagaaccaccactaattgatcaagactcaggtacaatatcacctcctcgtgaagtattctccagccctactagaccaaactgatgagtatcttctccttgattccagagcaaaggcacagcttgtgtgagtctctgtatttatcccaacgccttacttatttcatatcttacccctctctcctcaatatttgtggtctccatgagatatggggaatatgatttactcatgtttatacctacactgccttagtaactaacacagcttctagcacataggaaaagctcaatagttacatttttactatggagaatctgtggagatctctgtgtgtggtttctgaatgtctaattcaactctcacattcttcccagctgtccaatttgtagcctcctggttcaaacattgcccgtgctccctgcctgcctggaggagagcatttatgacctgtctcactctaattgctgctgaaacatccagttccatttctcacttacgaaggcattttaacctggttgagctgccctaaatgtagtatgtacatctccacctccacaccctcatttaccttatgcttcttgcccatattgtccacctgcacacatcaaaatcgtagtgtgatgtcactatacacccaccagaatggttaaactgaaaaaaacccgttcattgctgctgtgaaggtaaatcggcataaccgctttggaaatctatttggctgaatataaattcttatgaactacaaatgttactcctgggtatatgcccaacagcttgtacaggacatgtacaggaatgttcataacagtgcactgaactagaaacaaccaaaatgccatccccaggagaaaggacaaactgcggttcatttatgcaatggaacaccacagagcaatgagaacgagccattgctccacaaaacaatatggatcaatcccacactgtggagtatatgaagagattcctaaaaaacaaaagatttaatctacaaaagttcaaaaccaggccaaacttatctatggggaccagaagtcaagtgatggcctgtgtggtggctcacacctgtaatctcagcactttaggaggccaaggcaggaggatcccacaaggccaggagttcaagaccagccgaggcaacataagaagacctcatctctataaaaaatttaaaaaattagccaagtgtgatgatactcacctgtagtcctagctacttgggaggctgaggcaggaggatcacttgagcatgggagttcaaggctgcagtgagctgagatcgcgccacttcactccagcctgggcgacagagtgagaacttgtctctaaaacaaaatagtaagaagattatgggtggctcagtaactgggatggggaatgagggggtcttcagtggtgctagtaaagattctatttcttggtctgggttatgttacatgtctcacattttgaagactcatcaaactatatccttatgacttgtgttatacctgaataaaaataaaatctccacagcctctagcctatgccttctcataggtgaagttcacttaaatggttggcaaccagttaacttatagaactctacttccctttaggtatctgggtatgtttgggggcaggctcaatggctttgaattatactcaaccacgtctagtttgcccttctctacattgaaccacacaattcgatttcagcctggtgagcagctggggcagttgtgatgggagctgtctgagaacaagcttgctctacacacagtacatttttgggatgccagcaatggcctgctcatctccttcacagcagtgctacttaaagcatggtccacaaaccacctgtgagctggttagaaacgcgaatgatgagcctcacctccgacccagggagtcagatggtgctgggccccaggagttggtgtttctcaagatccccagatttattagccatgtctttgattttctgtattctgaggctttaacatgtggagccttgctgatcctgggggcactgctcctcccagggctggccaagtcctagagatggtaagcaactcaaccagagtgtgtttttcaaatacaaaccaacccagcaagagcccaccaccaaccacctcctttatagagctgtcacattcagggccagtactcccctgtcctaatcatcccagggccagggatcagacaactaagaacagagctgcagcccccatgccccagagcccattgaacttattccaactagccaatcccaagcctgcttaccctgcttcccccattcctttttgcagaaaccacagtaacagctcttgcccacctctcccctttttccccgcctctctcctttctccccctgccccatggttgaccccagggttttcctgtgtggtttcccatagcctggcatccccccacctcttgggtactgtgacttacaaactaccttttcagtgacaattgtctcctaatctgtcggcctttctatgcctcaaattttctattaatataccatattttaaaacaccaaggccaggcatggtggctcatgcctgtaatctcagcactttgggaggtccaggtgggtggaccacaaggtcaggagttcgagaccagcctggccaatatggtgaaaccccgtctcaactaaaaatataaaaattagctgggcatggtggtgggcgcctgtagtcctagctactcaggaggctgaggcaagagaattgcttgaacccaggaggcggaggttgcagtgagctgagatcgcaccattgcactccagtctgggtgacagagcggaactccatctaaaataaataaataaataaaacatcaagagatttgtgtgcacattaaagtttgaaaggcagtatttcaatgatcctctcctaccatttgcaaaagagtgacctagaacaaagttgagtcctgaattcatcttcttcccagaaaagggaataaattctatcagagagggaattatctttgaagaccatggctctgaatctctcctcaatgtgatggcagcaatgacagacctctgccacccccactcctgccccatctctggccctcccaatgacaggttaggtctgagcagctttctggatttatagggatgagagcagagacaagcagtgctcctcaaagaattccaaagttaaaatggcccttgaggctgctccatcttagaatggcttattccagggatttttccactctgtttaccctgtttctccacggtgtttcccactttctctcttctcaaaagttgtaactcaatgcttctaaaatagattttggctgggcacagtggctcatgcctgttatcccaacaatttgagaggccaaggcaggaggatcgcttgagcacaggagttcgaaaccagcctgggcaacatagtgagaccctcatctctacaaaaaaatttattttaatttgccaggcatggtggtgggttcctgtagtccaagctactcgagatcctaaagcaagaggatctcttgagcctgggaggttgaggccgcagtgagttatgatcatgccatcgtactccagcctgggtgataaagcaagaccttgtctcaaaaaaaattttttacgaataaattaataaataatggtcttagatggttttttcagaatttttttaaatttcatttttattcttacattgctataaagaaatacagaatggttttgttggtggtggtggtggttttgtttgttttttttgtcctctggtcactgttttagttccaaattatgttttacatgttatttaatatacgctgtcagaagagaacttatgaaagcatatagaatatgtcatgtgtaattgacataaactaacaaataaacataagagaattcttacttcattgttttctttcacagctatctatattcataaacaagaactcttctttcctcctaaacatgggatgcagccatttgtcattttaaagtgttatgggtagaaaagtaggggccgggcatggtagctcactcctgtaatcccagcactttgggaggccaaggtgggtggattatctgaggccaggagtttgagagaccagcctgggcaacatggcaaaaccccgtctctactaaaaatgcaaaaattagccaggcatggtggtacatgcctgtaatcccagctactcaggaagctgaggcaggagaatcacttgaacccaggaggcagaggtttcagtgagctgagatctgccactgcactccagcctgggtgacagagtgagactctgtctcaaaaaacaaaaaaggaaagttgggatgagggagaactctgacaagaggggatctacccaaactcccctgtcagtgctggtagagcccaggtaatcatactcatgattccagcctcagcaccacaaatatatcataataagagaccatttgtgggccgggcacagtggctaacgcctataatcctaacattttgggaggcagaggtgggcagatcacctgaggtcaggagttcaagaccagcctggccaacatggtgaaaccctgtctccacaaaaatacaaaaattagctgggcatgatggtgggcacctgtaatcccatccactcgagaagctgaggcaggagaactacttgaaccggagaggcagaggctgcagtgagctgagatcatgccattgcactctagcctgggcaacagagccagactccatctcaaaaaaaaaagaaaaaagaaaaaagaaaagaaaagagaccatttgcggaatacattctaagcaccaggtaataaactaagtgctttatagaactgttttgtcctggtaacctcatgataaccctataccagatgaggcacctgaaactcaaaatattaagggacttttggtttattgccttataagaagtactgtcattattcaaactcaggtccttctgattcaaaagacactgttcttaatgactgcaagatggatataaaaacttgagctgcttttctgcagaacagcttggaagttagctgtgggattttctaaaggatcactgcagattttcaaatatgatagtcatgaatttttccatgatacttgaggtgaaaaaatgtcatatttcttaaattttgtaaatcaaattaaaatctggctcacagccctcacccaccaaagtcaatttggagtccaatatgagtaataattgaggctttctttcccctcttccactggtgaaactgcccgcacaaggttaatgcgaattgcaagccaggctttaggcagaattatggttaggccctgcccagggtgcactggggtacttccagccactcccctgcagctgcgaactaaccgacagtcacatagcacacgggccacctgttctcccattgttcctatagatggaattctgacactggacctttttacccaagaatttctaaaggtgttcctcagattctgatttccagcagaatggctgattccaagtgaaaatccccaccaagtaaagcagtttcttcatggctccatcccatgacttcacccctcacttctcagccaatcagcaatccccacactttagccatcacctgtccagacctctttaagaacccatctcctggccgggcacggtggctcatgcctgtaatcccagcactttgggaggccgaggagggtggatcacgaggtcaagagatcaagaccatcctggccaacatggtgaaaaccagtctctgctaaaaatacaaaaattagccgggcgtggtggcgtgcgcctgtaatcccagctacttgggaggctgaggcagaagaatcgcttgaacccaggaggcagaagctgcagtgagccaagatcacgccactgcactcgagcctggcaacagagcgagactctgtcaaaaaaaaaaaaaagaagaaaaaaaaactccccacctcttgtggacacagatttgaggtttcctctcatctcctgggttgtctgtcctataattgttaaactctttctctgctgcaactccttgccctgctggtctcgagatctcaagacattaacttgctgagcagcaggcaacaaacctgttacagttacactgggcttacttaggttcatagaaatggtgaggaacccagtcttagggtgttctggtatttgatgccctgagggttagtgtttcttcgctacctatgggtctctgtgtcttctagttatcgtcactggcttctaccttcacgcaggttttcagtaccaccaggccatcctcacatgaggtcctgctgtctttgggctgccttattcaagtgggatcctagttttctacagctctacatagctctaccaaactcctctgggtcaaataactcttcctgttcaactgcaccagcctccagtcccttcccctcgtcagattcaattgtgttcatttccatcaatatctgtaagcaaagtatttttagagttgacctggggcttcccattcttccccccacatcacgtacaaagcaaaaacatacatacaaaaacagcacatacaaaacaaattacatacatacatgtataacaaaacacattgcgtataaaaacaaaatacactacctgctattgcctttggtcaaggaagtccaaaactaagaaaagagagagttcatttcttttttttttttcctttttctaatgagaacatggagaggccaggggagaaacaaaatatcaatttttcaattgctctcatttttactgaagtgatagttgacttggggtcaaaatattaaagctgaaagcaagacaatccctttcttaactctgagattctcccttcgtacattcccaagattgaaaccctctagagcccagcaagtaaatgaacaacatcaacatgctattgtttcctttgtctttcaaggccctgttcaaatgtctcctcctccatgaagacttcctgactatcattttgattcaagtcatttttttttttttttttttttttttgagacggaggctcgctctgtcaccaggctggagtgcagtggtgcaatctcggctcactgcaagctccgcctctcatgttcaagcgattttccttcctcagcctcctgagtagctgggactacaggtgcataccacctcacccagctaatttttgtaattttagtagagacagggtttcaccatgttggcattttttttcctttctttgttcccacagtaatttgctggatctctaccttgtactgtgatctgctttatatcctagatacgtgttaagtgtattaaatacaaagtttttgaaaatacctgccacatctcctaactgtatgttttagagtataccagtatgaaaccgctttatgtagtcccagcagagaatgggggaaaaaagttttggcttcattgtcatgaactgagatgagaaaatcataaatatgcccagagtttggcaaacatcatctccaaaactttattgggcagagtaattttaactggcttcgaagcattgacagtgatccagggtaattttatgacaagttctcttgcttaaaaacttaacttggacatcaaccaaatctgtatagtagcattcttatatttccagaatatcttgactgctctgggaggggagtctgtccctaggaaatggtgcagaacagtccaaataggaggctgattattcctcctggtgtcaggggctgaaaatccaaccctgaggccgcaaagtgcatcccgggataccagccagcttaagatgcaatctagtatagcacagagagcgttcggacactcggattgggatcagacgcctaggacacaagaagcaggaataactgtgagactatagccacctgctatttggatgcatctgatgggtatgtttagtttccactctgtaatgactgccttgcctcctgggccctatttttttttttttttttttttttttgagatagagtctcgctctgtcacccaggctggagtgcagtggcactatctcggctcactgcaacttccgcttcctgggctcaagcaattctccctgcctcagcctccctagtagctgagattacaggcttgtgctaccatgcctggctaatttttttttttttttcatatttctagtagagacggggtttcatcatgttggccagactggtcttgaacttctgacctcagatgatccacccaccttggcctcccaaagtgctggaattacaagcatgagccaacgcacccagcccctgggccctgttttccccacagccgcagccccttatcccttacctataggctcagcttagtttctgtgcgcatgatgaagtcaaaatcatgaaggatttaaggaatcacatttgatcttcacccctgcatggcataactacactgtgactttgctttttgacaccaagcttctggccgctcttactccaacttcacttcttgtaacctttttggatcgacttttgcctcttcttgaattcctgaatatttcttagcccctagagaggaaatctctctttgcttttatgcctccatccctgaactccaagcttatatttgagatccagttaccagctaccaggccccagggattattctgactccttcctggaacctcagcatgtggcctcttcccagctttcccaggtgctaagctctgcagtgttgggagtctttgatgttgtctgctgggtgctactacctgccaggtcctcataccaactgccgtcttgttctagagtcatccaagagtggatattcccctggcctcctgctgctgggctggtttccaattggctgccttcactgggtggatctctccatcctccaggtatcactgcccactggtctgaccaacctcaccagcagccaacccctgctttggacaggtttagttatatgggtgcctctctaaatatgttctgcagaaccttgactctgcagtgttggtagacataatgtacacaaagggttctatagtgaaatatgttttgaagagaatgtgtaaaagagttaaacaggattcttcatgggaagatttcacagagcctttaatataataacacgcactgacgatgtctaaggagggatagagtgagcgttcagtgttcctgaaacttaactgtgttttgctctgagcatgttattggacttaatgtccacacaacagactttgggaaatgctaaatcacattcttcaggttccagccccatgttaacccttacctcttgccacagtgacatgagcaaggacagcatcctacctttaagaagtgtttgtgttggctgggtgtggtggctcacacctgtaatcccagcactttgggaagccgaggtgggtggatcacgaggtcaggagatcgagaccatcctggctgacacggtgaaaccccatctctactaaaaatactaaaaattagccaggcatggtggcgggtgcctgtagtctcagctactcaggaggctgaggcaggataatggcatgaacccgggaggcagaggttgcagtgagccgagatcttgccactgcactccagcctgggcaacagagtgagactccatctcaacaacaacaacaacaacaacaacaaaaaagaagtgtttgtgtcttcataatcccaagccccaaatgcagcccaattcatgggacagtggagccacatgagctggttttggatcctgggccttctccttttttctgtatcccattcaccagttgtttgactctaaagattgcttaacttacctgcatctctatttccagttctgtatcatagaatggttgatatataattacatactttattttgactatccaataatagcaacagctaatattgagcatttgctatctacttatcactgttctaaacactttgcctatatcatcttttttcaatactcgcacaaatcacatagtataggcataccccatttttcagagaaggctattgagacacgaaacagctaagtagcttaccaaagtttaccagctaatcatgctaacctgagattcaagccaaagtagtttggctgcagagtcagcattctcaattcccagcactataatttatttcttcattcaacaaatatctattgagcaccaggtcatgctattgaccctagaagtatagcaataaatagacagacattcttgccttcatggaatttatattctaatgcgagagacaggcactatgtaaataaacatgggctttgttgtaggtaataagtgacatggagaaaaataaagcagtgtaagggatatgagagtcgaggggcagtattttgatatcaagttgggcactgtaggagggagcgtttcaatgggtacattgttccacagtttggctgaggctagctcctgcctgtgactaaaggtgtccatgtgacttgagctgcattacacatcgcaatgggccactctttcttcggggttgtcccagtgacttggcctccataactatgcctctcactgcggctccttgagggagataattatagcatagagtaacagaactttaaaagtaatgactgactacatagtttcctaaatatttgtgttttacttatttgtatcattactttttaatcactgtgattctaggggttgagttttcttttcaaatttttctttgtatctaatttccttgctgttagatacaacagcaaaagtacaaaagacaaaagaaaacctaaataaattggattacatcaaaattgaaaatgttgtgctacaattgatactatcaagaaggaaaaaatacactttacagaataaggaataatatttgcaaattacatacctgataagagacctgtatctagaacgtataaggagcacttacaacacagcaataagaagatgacccaattaaaaattaggcaaaggctttgaatacacatttctccaaaaaaaaaaaaaaatagagaaatggccaataagtaaaaggaaaacatgctcaacatctttggtcattaagaaaatgcaaatcaaaatcacaatgaaatatcacttcatacccactagaaaagctaaaattaaaaagacaaataataacaaatgatgacaagggtgtatatacagtgcaaacttaatttacctctggtaaaaattgtaaaatggtgcaggtggttttgaaaacaatttggcaatacctccaaaagttaaatatagagttacgatgtgatttagcaattctactcctgagtatacatccaagagaaataaaaacagctgagcacggtggctcaggcttgtaatcccagtgctttgagaagcaaggtaggaggatgacttgaggccaggagttcaagaccagcctgggcagtattatgagataccatctctacaaaaaaattaaaaattgactgagcatggtggtacacacctgtagtcccagctactcaggctgaggcaggagaattgcttggacccaggagtccaaggctgcagagagctgtgattgcaccactgcactctaccctgggtaacagagcaggaaccctgtctctcaaaataataataataaataaaaattaaaaataaatgaatatgaataaatttgtaattaaaaaaaaataaagaaaatagcacgccaggcatgatagctcatgactgtaatcccagtatgatatggttttgttgtaatatggtttggttgtgtacttgaattgtactcccataattcccacatgttgtgggagggacccagtgggagataatttgaatcatgggggcagtttctcccatactgttcttgtggtagtgagtaagtctcctgagatctgatggtttcatcaggggtttccacttttgcatattcctcattttctcttgccactgccatataagaagtgcctttcacctcctgccatgattctgaggcctccccagcaatgtgaaactgtaagtccaattaaacctctttatcttctgagtcttgggtatgtctttatcagcagcatgaaaatggactaatatagtaaattggtaccagtggagtggggtgttgctgaaaagatatgaaagcaactttggaactggctaacaggcagtggttggaatagtttggaggactcagaagaagaaaggaaaatgtggaaaagtttggaacttcctagagacttgtcgaatcgctttgaccaaaagtctgatagcgatatggacaataaggtccaggctgaggtggtctcagatggagatgaggaacttgttgggaactggagcaaaggtgactcttactatgttttagcaaagagaccggtggcattttgccccgccctagagatttgtggaactttgaacttgagcgagatgatttagggtatctggcagaagaaatttctatgcagcaaagcattcaagagttgacttgggtgctgttaaaggcattcagatttataagggaagcagagcataaaagttcagaaaatttgcagcctgacaatgtgatagagaagaaaagcccattttttgaggagaaattcaagccagctgcataaatttgcataagtaacaagaagccgcatgttaatccccaagacaacggagaagacatctccaggacatatcagaggtcttcacagcagcccctcccgtcacaggcccagaggcctaggagaaaatggtttcctggacctgtgcagcctaggtacttggcaccctgtgtcccagctactccagtagtggctgaaaggggccaaagtacagcttacgccatggcttcagagggtgcaagcgccaagccttggcagcttccgcatgctgttgagcctgcaaatgcacagacgtcaagaatttggatttgggaacctctgcctagatttcaggagatgtgcggaagtgtccggatgcccaggcaaaagtttgctgcaggggcagggccttcatggagaacctctgctagggcagtgtggaagggaaacatggggtctgagcccccacacagaatccctactgaggcaccacctagtggagctgtgagaaaagagccaccatcctccacaccccagaatgatagatccaccaacagcttgcaccatgcacctggaaaagccgcagacattcaacaccagcccgtgaaagcagccaaaagggggaatatatcctgcaaagccacaggggaggagcttcccaagactatgggaacctacctcttacatcagcacgacctttgtgtgagacctggagtcaaaggagatcattttggagctttaaaatctgactgccctgctggatttcagacttgcatgggccctacaacccctttgttttggccgatttctccaatttggaaaggctgtatttacccaatacctgtacccccattgtatcttggaagtaactagcttgctattgatttgacaggctcataggcagaagggacttgccttgtctcagataagactttggactgtggacttttgggttaatgctgaaatgagttaagactctgggagacgtttgggacggcatgattggttttgaaatgtaaggacaggagatttggaggggccgcatgtggaataatatgatttggctgtgtccccaccccaatctcatcttgaattatactcccataattcccatgtgttgtgggagggaactggtgggagataatttgaatcatgggagcaatttcccccacactgttctcatggtagtgaataagtctcatgagatctgatggttttatcaggggtttctgcttttgcatcttcctcattttctcttgctgctgccatgtaagaagtgcttttcgcctctcgctgtgattttgaggcctccctagccatgtggaactgtaagtccaattaaaccgctttttcttgccagtctcaagtatgtctttatcagcagcatgaaatggactaatacccagtgctttgggaggctgaggtggaacgatcactggaggccaggagttcaagaccagcttggccaatagagtgaggcaccattttcacaaagacaaaacacaaaaactttgctaagcaaagtggtgcacacctgtagtctcagttactcaggaggctgaggcaggaggatcacttgagcacaggaattcgagactgtagtgaaccatgagcatgccacttcacttcagcctgggcaacacagcaagaccttgtctcaaaaaaaaaaaaaaaaaaacacaaccacaaaaaaggccaagtgcagtggttcatgcctataatcccagcactctgggaggctgagccaggaagaagccaggggtttcaggccagcctaggcagcatagcaagaccctgtctctacttaaaaagtaaaacatgtccaaacaaaaacttacacaaaaatatttataacaacattaaacataatagtcaataagtggaaattttcccaatatccatcaactgataagtatggtagttttgatttgtgaaattttttatttgtcagtgaaaaggaatggcacaacacagatgaaccttagaacattatgcagtgaaagaagtcagtcacaaaagactacatattacatgattctatttatatgagctatctcgaatacaaaaatttatagagacagaaaatagattagtaattgcctagggctgggaggtttgtgggaaatgggtaatgactgctaatggataaagggcttctttctatggtaatgaaaatgttctaaaattaaatttaaattagatggttgcataattctgtgaatatactaaaaaaaaccattgaataatataatttacaggggtgaattgtattgctggggctcagaaaacaatatcccaaaatgaagggcctaagaagcaggctcagaagcaaacatttttctctgactttctcatgctctcctatctctgagtcccattctcccccaaggctaaccatacaaattagaatccctccatcctacagcgggtcatagaaaccagaacccattttccccaaaccagtcgtaaaagctaaaaatattactctaacttttactctgcctttctgtataaatactggtcataaagaaattatctgacctaccccatttgactgtaggctataagactccattctagagatggtccttccccacaccaagaaggaagaaggcattcttggagcaggaggtagaatctagacaaacaggccctgctgggtttccccacccaatctattagcattagatcgtactcattttgtccagtcctatttctaccagctgtccacactttgttgaacctaagcacaaaaacagtcaacttgggccgggtgcggtggctcgtgcctgtaatcccagcactttgggaggccgaggcgggcggatcacaaggtcaggagatcaagaccatcctggctaacacagtgaaaccccgtctctactaaaaaatacaaaaaattagctgggcacggtggcaggtgcctgtagtcccagctacgtgggaggctgaggtgggagaatggcgtgaacctgggaggccgagcttgcggtgagccgagatcacaccactgcactccagcctgggcgacagacaggctggactccatgtcaaaaaaaaaaaaaaaaaaaggtcaactttccctgcatctttaggtcttcattctaaaggctcctgtgtatacacattaataaatttgtatgccttttcttcaatgaatctgccttatgtgagttgacttttcagccaaacttcatatggtatgtgatatggtttggctgtgtcccaacccaaatctcaaattatagttcccataattcccatgtgtcatgggagggacccagtgggaggtaattttatcatggggtgcgtctttcccatgctgctctcatgacagtgaataagtctcacaagatccgatggttttataaaggggagttcccctgcacatgctccctctcttgcctgctgccatgtaaaatgtgactttgctcctcattcaccttccaacatggttacaaggcctccccaaccatgtggaactgtgagacagttaaacctctttcttttataaattaccagtcttgggtatgattttattagcagtgtgagaacagacaaatgctgtatgtgaattatatcttaataaaactattaaaaaatttttttactaaaaaaagataatttttttgtctactaaaatttctttactaaaaaaggggttttgcggagatgatggtcaaaggatacaaaattttagttagacacgagaaataagttcaagagctctattgtacaacatggtgactgtagttgtaagctaaaaataacattctaaggccccctgccaaaccatctgaatggacccttcctctcggccaagggcattccaaatttaacctgaaaaaactagctcaggccatgatgggaagggggaaccagacatgctttactatactctcgtcccttttggaattactgatagaacggactctttaagtctgataagaaacatttacaatctattctctctgaagcctgctacctggaggcttcaactgaataataaagctttggtctccacaactccttatcataacccagacattcctttgtattgataataactatatatatatatttttttgagacagagtcttgctcttgttgcccaggctggagtgcagtggcgtgatctcggctcactgcaacctccgcctcctgggttcaagcaattctcctgcctcagcgtcctgagtagctgggattacaggcatccaccaccacgcctggctaatttttgtatttttagtagagacagggtttcaccatgttggtcaggctgatctcgaactcctgacctcctgatctgccctcctcggcctcccaaagtgctgggattacaggcatgagccaccgtgcatggccgataataactcttttaaccagttaccaatcagaaaatctttaaatgtgcctataacctagagggctccctgctctgtccccacccctaaccccactttgatttgtcccacctttttggatgaaccaatgtacatcttacacgttttaattgatgtctcatgtctccctaaaatctataaaaccaagctgtaccctgaccgccttgggcacatgttctcaggatctgagggctgtgtcatgggccactggtcactcatatttggctcagaataaatctcttcaaatattttacagtttgactcttttcattgacatacttattaacaatgtattgtattcataaaaattgctaagagagtagatttaagtgttttcacttccaaaagataagtttgtgagagaatgcatatgttaattagttcaatttggccctgccataatgtatacatatttcaaaacaacattttgtacatgataaatacataaaatttttatttgtcaaagaaagaaagtgagaaaagaacttatatctaaagaatgtgagtccctttaaattatcacctccagagagacactaaaatgaggcagcactcacttcctactcctccactcctgccctgctttaagctatgtatttgtctcttggaactgtttgctatcacaagtagctatatattcacctaataatgccacagtgaacattataacctacactctatagcttaacaatgtatagtcaatcactaatcaatgttctatcagacagtgagaatttctgacaaacaactttgtatctatccttcttctttgactttaaaaacttgcttgaaacaaaggccaaatggagctcatattcaaggctacttgcatctgactcttccaggcacctggcctcactttggctcaagtaaactctttaaattacattttgtgcctcagtggaaggaagaaaggaaggaagaaggagggagggaggaaccaagaatattccacctcaaaatacacacttctttggcatatttggagatggatgttcagaggctctcctgcaaggtgccttttgtgaagcagatttgcatctgtagagaaactctgcattggtgaaacaaacagccaggttttccctacccgctgtccctgatcaggaatcaggatggagacatgactacctcctagaagagagagactgaagtctgatacttttgggggtctgacagaaactccctctttctgagatctgctcactgtaagctttcatctgcataacaagacatgctttgctagccaggcctcttctcctctccctcccagaagtggttttgtccctgccccaagcccctgttctttcctcaacctcaggacaatataaaactttaaccatgtggctttttctttgagcttttcatatacgataagacttctatgcacacatgttcacattaacaaattgtgtatcctttttctcctattaatctgccttttgtcaagtgattttcaatgaaccttcagagagcaaagaggaagttttcccttggcccgctacaaaagaaaaatagaaaacaccaagcgttgttgaaatgtgaagcaactggaaagctcacatattgatgggggaaatgtagcattttttaaaaggtagttctatttaaattactaatagataatattacaggaaatctgcagacactgacaaaattgtaaagatgttacccaagtgactgaagtatgaaaaaagccccaatctttaactgggcattcagggccctacacattttagctccacattctcaatcctcttagctgctcccctgcccctagaataccccagggcacaccagttaccttgcttttgtcttactgtgagaatgataactgaaatttacagagagttaactctactttcaatgtgggtagccattaagtctagacatccatgaacatatgcaatctttatactatctctatataaatagttattattgcccacagtttgcagataaataaacatgaagctacagaggattaataacttgagcctgactgcaatgaaactcattactatcatggttcctcttgaaataaatgtctacttgccctcaccttttgggttgtgtcttggttttggatatggagacaggatcagatgttctgctgtttgtatctccccacacacagtgaggacagaacccaaacatgggtcgctgtgagctcatgaatctttcttgtctgttggtcagtcacatctttggctttaggatatctttcactttagcagaaatcccaggagacagatgatgtcttcaggttcatatatacttgacatttagtaagtcataaacttgattctgagcattacctctcatatctaggcaaagtttccatccttgagctttccaactagtttaatttggccaagatcacatcagcatagtaaatactcagcactaattttttttttttttttttttttgagatggagtctcgctctgtcacccaggctggagtgcagtggcgcaatctcggctcactgcaagctccacctcctgggttcatgccattctcctgcctcagcctcccaagtagctgggactacaggcgcccaccaccacgcccagctaatttcttgtattttttagtagagacggggtttcactctgtgttaggcaggatggtcttgatctcctgacctcatgatctgcccacctcagcctcccaaagtgctgggattacaggcgtgagccactgtgcccggcccactcagcactaattttaagggaggagaccacccatcatattgtcttatgcccaatttctgcctccaaagaaagaagaagtaaaaactaaaaggcagaaatgaaatccacaagcagacagcccagcaccacaccctgggcctggtagttaaagatcaacccccaacctaatcagttatgttatctatagattacagacattgtatagaaaagcactgtgaaaatccctgtcctgctctgttccattctaattaccagtgcatgcagcccccagtcatgtaccccctgcttgctcaattgatcacgaccctcccaggcggacccccttagagttgtgagcccttaaaagggacaggaattgctcgcttggggagctcggttgttggaaacatgagtcttgcggaagctcccagccaaataaagcccttcattctttaacttggtgtctgaggggttttgtctgtggcttgtccactatgtttcagcatagtggaggctcatgctgatcttgtcttcaagtcttaatctaggatcagaaggcagaggttcaaatgatgaggcaaggctggcctgaatactcaaggttggccctctattctgcctctgctactgttagtgaggaaagagaaggcatcactcaccccctatgtaactcagtagaactatagccccaaattccaagaagtgacatgcctcccatttcagagctgagaaacaatgatctccttgtttttcttcttttacccatttgcctaacctcatatataaaggcttatgtgtcctttaatttccatgttctacctacataatccctcagcaggctttagctaagaagcatgggcttcctctttctatttcctctcttaatcttaggtcctgctgattgcatgctccagcagaactgtatgttatagctggctctttgatttcctgcttatgtctagaatgctgtcaattcttcagtgattttacacagagcaagctctagtgtttgcttcattttctttctctgcctcttatatttggctttctcaatactttagtcatataggaacaacagttataaataaggccctttataactctatatgtgtcaaggcccccatatatcacctgtacaatgaacaattaatagttgtctttgcattgtctcaatttgtataataaacatatagatacacacacacacacacacacacacatacatacacacacatacacacacatgagaaagcaagatgttttttaaaagaaatcaaatggataaggcaggaaaaaagcacaaaaaccagactgggcgatgaccccagagaaaacggagtagtggagaaaagagcagtaattagtcttccaatcgtaaggctctggtttggggatcctgataggaaaaagaacttgggttttagatttgattctctgtgcttccttcccctagcactgactggacaaaacttcagagagcccgtttgtttattttcttttcaactgataggtacagtttgtctgatgtttgccaggttatgcaaaatgtcttcaaagcctgtgaatgacccaatttagttcccaagacagagaaaaaacatcatgtgcaaagcattgtactcctgttatgtggtttaatttatctaacaattttgtgaaataaatataattatttccctttcttaagaaactgaggatcccagaaatcaaatagtgaccagaacagacagtggtatgttatgcacaagcttttgagagctaggtatacacctctcttctcaaatccgtatatagtgatgtcaagtcattagcttggaatcaaccatcctgagagcatttgcactatggaaattagaaaatgctataaatgagtgctttctttgagtgacagttgtcaaatattttatgctactgacaatagtgttataatcggtagctacttagacatgagcagggcacgagagggcccccttccctcaactaggaatgtcagatgaccagcaggtgatggccaggtggttgttaactgtctctctaaaatattaattggttgcagccagcaccagagaaagacagtctcctaatagatagaaatacctgaaactgatgaccagcagcttcccaataagatctcaggagttaggcaagtgggctcaagcatgcacactgaaaagcaatttggtggagtttaactgggatatggctgatgtggtttggctctttgctccccaccaaatctcatgttgaattgtaatccccagtgttgggggaaggacccggtgggaggtgattggatcatgggggtggatttcttctcttgctattctcatgatagtgagttttcatgagatctggttgttttaaagggtatagcccttcccccttccccttctcactcttcctcctactcccaccatgtaagatgtgctggtttcccccttcaccttctaccatgattgtaagtttccagaagcctacccagccatacctcctgaacagcacatagaactctgagtcaattaaacctcttttctttataaattacccagtctcaggtagttctttatagcagtgtgagaatgaactaatataatgactgccctctgggaacactggactggtaagggaagaatgcttcaagtgagcatgcgtacaactccagcaaacacattgaaaacgcggcccctcttaagtgctggcaggccactgcgcttgtggacagtccctccccaatggaagaatcaggggagaagagacacaaccccctggaagcatgccaaaatttaaaaccccaagtcaaaaggtcaaaccatacacttgatctcaagtcacccacctggccctcttccaagggttctttatctccttttattcctgctctagagctttttaataaacgttcactcctgctctaaaacttacctctgtctcactttgccttatgcccctcagtcaaattctttcttctgaccacgcaagaattgaggttgctgcagacccatatggattcgccactgctaacatactttggtgtcgtgtgactcaaagatgttccctagtgctaacaataggattagaaacagtcttttagacacaactgtaagttcctcctttgaggctaacacagacccttcaataggctgagattctacctcagagttttgtcttccagcaagtacattaccatcattccaaaatgacttctctggatactttctaactttatatttacggccctgctccgcactttggtcagctttgcactctcttcataatttgtgccaagcctgcataccacctgcactattagtcatttaatatttttctttaaattgcctcaaattattttgtatattcataaagatgtttttaaaggaaactaatggataagacaggcaaaagtggaaaaagcaggaaagaacagagacaatctgtttactctgtgttagaggacaaagcccacaattgctacaacatggagagaaaagtgggctttgagggttgacaaccaaaatgagtgactgaggtaggtgtctccatccatcaaggtttactgagccagcttgaaggcacatcgggaaataggcaaatcatagatgtgtctgtggctgttttttccaaagagactctcaggtttaatatttacacattttccactaaaaagaggaagcagttaagcaaatgattacatacttggagactttagttcgtgctcaataagtctgcatttgacatagatatgtaagcccttgaagaaaagagagtagaggaacaagacaagcagacgtctcagggtggggtgcaggacccattaatcttatcttgtctttgttccttacctggagagataagctaggaataagcattatcagtgtggagacttttgaaaggactgttttctgttcagcccttagggaagaaaccctactggccattagcaagagaggggatataatgagacctatgaaccccccatctggttatgaccaggaactcagctttgaaggattttctgaggatccttcagccaagaaaggggtctgttcagtcaactgggggcttaaaattttacttttatttctcattcaccacttttggtgaagatttgccacagacagcatcaatggccaaacctttattttgtcccgtatcattgtcagaatgatgttgctgcccgccccaggtccgtcctgtccatgacccatcctgtggtcaaaagacttagagccaaaaatcttacagccaatttcatcattccagacaggaacggaggtggacaggtatctatcaacccttaaaaccttttaagcaatgtaagagccaaaaatcaaagccaaaaagaaaggttacaaaattggcttatctataaattctatgcattgtgctgccataatcttggttttagttagactggtagcaatgagatgtacaaaacataagcattttgctaaaaccatttaagcttaagaagttagaggcttttgttatgccaaaatgcttgacacctttttagtaatttgtcctaaggtggccaacaaatttttttgtcatatctttatttgcataaaccccataactgaaaacaactatatgcagaaggctctattgccaggtatcttggtatcctcttggtaattctcttttcagtctatgggaagcaggaaattctttatggtttggatagatgaaaaggaggtcacataatgactcaggaggcaaagtccctcaatttgccagctgtgtgtctgtgtgctatctgtgtgttggtccttgatttggagggtctgaactaattatttccctcgaaactagtccgtataatctcctgtgcctacctcttctgtgatagcccctaggcttacagagagggtgcttatgatatgagagggaggcagggaagtgctgggtagagaagggtggggtccctggctaggtctccaccctcaggcctgtgcccacggacctaggtgagggcgggcatttctgtttttgtgcccagatgttgcattttccaagacaaccctggcctgccactccctgcatcctgtgcctataaaaaccctgagaccctagtgggtacatacacaagcggctaaatgtcgagaagaacacaccagcagaagaacacacagacactgacaggccatccatgacagaacaacgcggatgccaagggaaatttggctgagggcggtcagaggagagcccagctgctgagtggcctgtctccaggggaagaccaccttcccattccatcccccttctggctttccatccacctgctgagagctacctccaccattcaatgaaaccttggacttattctccaagcccgcgtataaacagatttttccagtacactagggcaaccccgggatacagaaagccctctgtccttgcagtaagacagagggtctaattgagctgattaacacaagacgagtgcagatggctaagttgaaagaggacactgtaacacatgcccactggtgcttcaggagctgtaaacactcagccctagatgatgccgtgaggttggagcccacgttccccacgacctgcctatctgcattctccccctagggggttgaactgcagggcgctgaagaagccagccagtccccatgtcacacaccctgtgaggggaataaggaaactcttcctgtttcaactggggccttgcctgagatcccggaaggtgagtgcaaaagtgaaactgttggatctgcctcttttccaaaatcctgccacctgtctctctttcctgaaggcaaaacgttctgtttcccttcatggagttttaactgccctaacgggccgccagaatccccagactccatctcttttctcattctctgtctcacagtttgaaatggctcttatctcttcctttataatgttaagagttttgctacaggctgtggcaatgttactaagtaaaatgattattcggctcagccaccaaaggtgcaaatcagaccaacagttgttagaggtaaaatctcctcccctgccctgacagctgcaggcacccatggctcaaggcacctctcattagcctatcccctcccaggttgggggcctgggcatgttcacggcatgcaaaggtcatgcccaacagccatcagggggcaggaggagaagtgccgccatggcccacgctgcctccacctccatagcctgggatgagctggaagcaggagaaaactgcagcagtaggtggcaccccacagggctgaagggtgggcacttctcacccgccacaccaatggaacttttcctctcctggccaaggaattcaacccagtctgatctgggggaagaatacaaggattaatggaacccacttgccctgagccaggggctcttcccccaggacctccccttttgcccctgaacctgtttttctatttttcttttttttttctttctttttttccttttctaagtgagagggctcgcccttcccagcactgtttctgatagggaagttaatgggggaatagcccaggctggctgataactgcaaattcagcagggctcatttgagacactctaaacggatacaaaacagcctctgaaataccttttcagtcctaaactcaattccaagcttcaggctgaggccctaaaaagaaaaaccaggtcagggatccaaagccaggcaacaggcatgatgtaaatggccaggaccaattcctgccgactgaaccccccaccccatggaaggaggccatgctccgtgggctaaacaggcccagggaactcaaaggttgtcgacagcagggagaaagggaggcataggggagggtggttaattcctgttctctaggtcttccctgcttcatgggtacacaccacattggtatctatgggcagcacgtgccaaggttgccgggctcgaggataaaataagtggaagggaaagggggaatgcttgttttctcgctccatcacactctgagttttcactgaaagaaggaagggaatgagggagacctctattccctgtctttcagaatggacaaccagatcgcttcaccatacccagcttatactcctctggagtgtattcggaaccactggcactgctttaacctcagaatctggaggaaaaaatgcctcatagccctctgtacaaaggtttggccaaattatgaaggactgggttggccccaggaaggaaccattcatttcaactccatctggcagttggaacttttctgtagacatgaggacagatgatctgaggccccatatgtgcagactttctataccttgcaaggcaatccaggcctttgcgaacagtgtaggattgatccagccctcctgtttgccgtctcagggaaggctgcaaggggcaagcccggggaattaaagatacaaatcccagaggcactcccagcagaggagccagctctctcaagccctgctcctctggatccacctcaacctccctatccagcttctgcctcttacttgccccctcctagaaatccttaccctaaataagccccagtctccctcttgcccctccaacagatgcccagtgtatttgggcccagtaaggtccaggtccccttctcctacaaaacttaaagcaaattaagttggatcttggcaagttttcagatgactctaatagatatatacagactttccagaatttcactcaaatatttgaactctcctggagagacgttatgttacttctgaatcaaaccctgatggatactgaaaagcaggccattctgcaagcagcagagagatttggggatgcgctttgtatcacatatggcatcagagaagggggcgaacattatccaactggaagagaagcagtacccgtggatgaccctaaatgaaatcccaacaatgaaatggaaaactggaagaggagacactttcaggtgcgtgtaatggaaggcttatgtagaactaggaccgggcctctccattatactaagttgtccatgatcaaccagggattcaatgaaaaccccactgctttcttggaaaggctaagcgaggcctgggtaaagcacacctttctgtctcctgattcgtctgagggacaactaatcctgaagaataaatgtattactcaggcagcccctgatatcaggacgaagttacaaaaacaggccctggggccagacagtattttaaagaacctcctgaaagtagccacctcagtcttttataatagagacagggaggcccaggaaagagagaggaaatacaggaaatggaggctttaatggctgccaggcaagcccacaaaccccagaattcccagggtgcacctgttaactgctacagatttcaaaatggattgcccagctggcatgaggaagccaccccgaccctgtccaatctgcaatggagaccactggagagtggactctccccagggatgctggttactgggtctagaaccaatctcccaaatggtccagcagcatgacttctgggtcccggcactcctcttcccggctccagtggcctacacaaccattaccatccaggggccttgggtaattctggaaattgaagggaggaaaaaggacctcctcttggacactagagccagtctctcaattctctccaatctgggctccctttttatctcagcatgaccatgaggggcagctcaggaaggcgtctaacccaatatttctctcaaccccttagttgtagctggggagaccttttgttcactcatgcttttctaattatgctttaaagcccaactcctctgttgggcaaggatatcctggcccgtacggggaacaccattctgatgtcccctgggcaaactctttgtctccccctaatggaggctgatattaacccagaagtttgggcaacttgagggaaaattggacagccatactagtccgggtccatcttaaggatctcacctcctttcctaaccagaaacaatatcccctgaaaccagaggtcaggaaagtgctagaagccatgatatacgacttaaagatgcagggcctcctcaaaccctgcaacagcccttgtaataccctgatattaggggtatgaaaacccaacatggaatggacgctagttcaggacctctgcctcattaatgagactgtggttccaatgcacctggtggttcccaatctatataccctgctagcccaaatgcctgaggggactaaatggctcacagtcttggacctaaaggcatgccttcttctgcataccattacaccctgactcccagtatttgtttgcatttgaggatccctctaaccaaaccacccaattaacctgaacggtgttacctcaaggattccaagacagcttccacttgtttgggcaggcattattgagcgacctctctgagttcctttatccttaggtgaaggtcttgaaataggtaatgaacttctcttccgtgctccaactgaggaaatctctcaggagggcagtaagcctctccttaattttctagctaacagagaatataaggtttcaaaaccaaaactcaactctgtctgtcttgagtgaagtaactaggcctggtcttgtcagaggggaccacaacattaggcaaagagagaattaaacccatctcctcctttcccctccccagaaccctcaagcaactgaagggattcttgagcattacaggaatctgcagactactgatacctgggcacagtgaaatagctcagctatttcattattatcatctaataaaggagactcaggcagctaaaactcactgtctaacttgggagctggaggctaaaaaggccatcgatcaactaaaacaagccttgcttaaggcaccagccctcagtctccccacagggaaaacgtttaatctttgtgtaacagagagaaagggaatggcactgggagtcctaacacagacctggagtccagcccagcagcctgtaggctacctaagtaaggtgcacattttggtagccagaggatggctggcctgcctccaggcaatcgcagcagaagccttgctgataccattggctactaagttgaccatggggaataacttaactgtttataccctgcacaatgtggcaggactactgtcttctgagagacaatagtctcctagaagactaatagacaactgtctcctcaagcatcaagctctattgttagaaggatctacggtccaattaagaaactgtccctccctaaatccagtcatcttcctcccagatgaagctgggaaacttgagcatgacggcaaacaaatagtagcacaaacttgagcagcaagagaggacctcaaggaaactctcttagagaacccagactagattgtctttacagatgggagttcttttgtagaacaaggaacccacaaagcaggctacgcaatagttactctaaacgatattattgagaatgcacttctttcctcaggcacaaccagccgaactaatcaccctcaagagggcacttaagctaagcaaagaaaagacagttaacatatctactgattctaaatatgctttcctagtccttgacacccatgccactatctggaaagagaggaacttcttcacagctaatgggtctcctattgaataccatcaggaaattaacagcctattatcctcagtcttcctctcatgggaagtggcagtgatacattgtaaaggccaccaaagagggatggatgaaatagctgagggaaatgggctggcaaactaagcagctaaaacagcagccagggggtccccaggtctctgacccacttgaagtcccattggtctgggagggcctcatcagagaaataaaactgcaatactctcccgcaaaaatagaacgggccacctctcagggatacatccttcagtcctcaggatggctacaatcagagcacggtaaacttcatctacctgctgccaaccagtggaaaattttttaaagccttcaccaggccatccacctaggtaaggataaaacctatcaactggcccagagattgttctcaggtaaaagcctaatacaaatggttaaacgagttgttactgcttgtgagaactgcctgaaaaataatcccctcaattgacagcttcttcctccaggaacccaaaggacagtaggccactaagaaaaagagtggcaaatggatctcactcatatgccaaaggcaagaggcatccagtcctcctagtgtggatagatattttcactaaccaggtagaagcaatttcatgtcagacagagaaagcccctgagatgataaaagtactaatcaatgagataatccctcactttagactccctaagtacctccagagcaatcctggcttttttgcttggcttccttctctattagattactggcttttgggtggagccctttagtgaatagggaaaagaaagcatgcagttcttagggcctaaactgcacttttttgtttgtttgtttgagatggagacaaagtcttactctgtcgcccaggctggagtgcagtggtgcaatctcggctcattgcaacctccacctcccaggttcaagtgattctcctgcctcagcttcccaagtagccaccacacctggctattttttgtatttatagtagagatggggtttcactgttacgcgcgtccgtgtgaagaaaccaccaaacaggctttgtgtgagcaacgaggctgtttattcacttgggtgcaagtgggctgaatctgaaaaaggagtgggcaaagggagataagggtggggcagttttataggattagggtaggcagtggaacattacagttaaaggtggttatctcttgcaggcagggacagggtcacaaggtgcacagtggggagatcatgagactcattgtccaggggagggatacacaaggtcgattgactagttagggtgaggcaggaacaaatcacaatggtggaatgtcatcagttaaggcaagaactggttgtttcacttcttttttgattcttcagttgcttcaggctatctggatgtatacgggcaggtcacaggggttatgatggcttagcttgggctcagaggcctgacattcaccatgttggccaggctggtctcgaactcctgacctcaggtgatccgcccactcaggcctcccaaaatgctgggattacaggcatgaaccactgcaccaggccctaaaccacattttttttaacccaaatgtgcaagaagcaagtagccctctgtagtaatgaccatttaccataaacaacttccatcagccacctctaaaactgtatctcttacccaaccattacacacaccaaagtctagttttctcacaatataatgtaatttctggcaccccccacaaaagccaaagagattaggtaacaattcaaaagagggcagagctttagacccaagaagaccatcactcttgaatcttcacaaggaaaatggaagacctccacaaaaggggtgagtaatacatttttccgggttcctaaaggggtctgagtcttctctagatcttttcaaacaatactgaatatggcaaagaggaagaagaagtaggaagagtaaaagtaaaatgggagaacaatttttaagaaaggaaatgaacagaggcattaagcacatgtgttctttttttgaaaaagatgttttagtccactaaaatgtttccaaaacaggatctaaaaagaaaaagcagaaaggacttaaattttatatatgtatgtgtgtatatatatatttatatatagtatatatatttatttatatatgtatatgtatatatattttatatgtaaatgtgcatgtgtataggtatgtgtttatatgtaaatatatatatttatattttatataaatctatcagcttttaattaagctgacttctaacagtaggactctttttaaaaattttttcaagtaatttattaccagattttagctgagagaaacagctgatatttcaagtcaacagaaatatcaaaccaaaagggaccgattcctcattaggaagacaacccaagccatgatgggaattttaaccaccaaactacaaaatggactagcctccatgttaatcctgaatggagttcaaagtgggcagtttgagtgtaactgttttaggtcagatttttgatctttgacttagtcaagataatttttaagggtagccatgacactattatagctccttcttttaatttgatcttcccaccaattgttaagaataagagatctctaaaatccctttctttattgttaagaataagagatctctaaaatccctttctttaaaaaggattcaggtgtccaaaggatcaatcttttggtcattgacaattagaattttcagtggtatatttaatcccaatagcagctcaattcagtagctcactcaatttcagtgagtgacatcaatgaacagccacatgcttctaatagtgtacacaccatactctggggaacatggcctccatatagaccaacttggtatccaaaaaggaaacgaagtctgtttgtatgatcccttcttaggggatgcttgtcattgtctgaccattgctgaattctttaattttccattgttatatagccagatacagaattttgccaaggattgataccaagcttaacagtttaaataaaccagatctttgctgttcccctaaatggagatcatccaaacattgtcaattgctgtactagctctcaacacacacacacacacacacacacacacacacatacaccgttattacaaacagtgatggttacaatcaactgatcccatgttacgtgccagttcccctgcactcattctttccagtcctgacagccctaaaaactatgtattatcaccattttaaagatgaggcaatggaagtttaaagaggaggcttaagcctttactcaaatacacctgtatttgaaactaaactctgcaacttacttactagtggcagaattgagttccattgttctatgaactttgctaaatctcaccctggaaaacctcataccttgtaaatatacaaaatattttctttcctatggcttttaaattttctaaaactatctacttttataactacctggaaagtgtagtagatgccgttagttgcaatccagcacccattctccactcttccttcccaagagaatgccagtttcatttaggtctgtatcatgcatatcacaggacgcaggagaatttgacgccactctgaaatccaggggtaggcctgactgggctaaagctaaaccactcctcctggtcagtggttggtttggccttgagcatgtgacctacttctagacaatgagacataatgagaggcctgtcagaggctttggaaaacttctctttattctgaagaaagccccaggaagttacttttccaagggttgtaagcaagcaacttgtaaacttgattgctaccagcagctgtcctaaaaccacaagcggaaccagtcttaaagtgaagccaaaactgtggcttgcagagcaaaaaaacagaagtgaatcacatgggtccttgatgacatcatcaaacagcactgaaggctaccctatcctggactttctctttatgagctagtaaattctgtttattagacataaatccatttaataactttctaaaccagtttgagttctcttttctgttgttacagtccaaaagaccctaattgaatactgacaataatacagccaatatggtagacaatggtttaaaaaaaaaaaaaaggctaaaatggagcacaaaatgaagtaaatgaagtgggaaatctgcccattgggggataaggagaccaccagatgaaggagtaaacaaactctttggggtaaataatcatgactatgtccttggcatcaactgtcttcattaaacaaatcagtagttttcatcatgttgctctgacaccagcagcatcagcaacaccttggaacttgttagaaatgcaaatgcctgagctacgccccagctctagtgaatcagacagcctggggtggggcccagccatctgtgttttaataagccctccaggggattcttacgcaagctcaagtgtgagaaccacttccttaaatgtattgggaaaagtgaatttgcctgagtcgttctcattattaactattagcacttgacttgaagtcagagtttagaacctgctgtctttattccaaatttttagtgtgggggtctcagatcctcatgtgtttagagtcttgagtcactgagtagccgcttctggcaaactgaatcttgtgcatgttgacctaaagccaaattagaactccctttactgctgttaagaaaccaaactttacaaagcaccagtccaccctgcagagtaaatagaaacagttttatttggtactggaggcacatagagaagtgtggtattttctacctctttaaattgccacttctggaacatttctagtgtagttttgggctggctaagtatagatttttaaattaatgtatttttttcttgctaagtaattttatggtttgaaaaattttctttaatatgcaattgggaggtttaatgctctaagctccatgaatatttctgtagagcaacctgctcatagacaattattttagcagtatcctaggaatgatcagtatcattaacacagtgtaatcatgttaaaaggaaagtgtctttcacccagggaatgtagcatgtggttagtgtcttgataattaacccattgcccttgaaaaaaacccattgaaggtaatcagaagcaaagacaattaactcctttcaaacaatttcctttgtatctttactcccatcttagaaaggagattccagaaggacttgaaggaaacaagaagacagggatagttagatcacgtcagaggtgctgatgaggccactgtgccaatgaacgttaggtgtgctgccggatgcgaggaggttctctctcttttcgtgattctactctattcctgtgacacctcagaaacatcaggtgccatggcttccagacaggtgctttttattaggccccaatcctcaatcactccccatttcatcacctgtaaaatgatgatatgcctcttttggaggctgttatcaggattcaatgcaataactatatgcagaaaagatttataaacttacagtgtagactcatataacacatttttgttggcagttcctactttgacggcttcctttcagaggtttctgttccttccatcagagcacttcaacatgtatagtaagtcactctgcacaggaaagataaagataatatctgcttctttttttctttttttgagatggaggttcaatctcgttgcccaagctggagtgcaatggcacaatctctgctcattgcaacctctgcctcccaggttcaagtgattctcctgcctcagcctcccgagtagctgggattacaggcacgtgtcatcacacccagctaatttttttctatttttagtagaaacggggtttcaccaggttagccaggctggtctcgaactcctgaccacaggtgatctgcccacctcggcctcccaaagtgcttggattacaggtgtgagccactgcactcggcccatatctgcttcttaatataagggactggaagcctgtgatataatttcaagttaaaacagagtcatgttaagttactaaaaactgccattccatgtgatgagagaagaatgttcagaatgcttcaaacaacactgacggctgtcctatgatggacttcctctttatgagctagtcaattctgtttattaaatgtaactcttgttgagataggtgcgaagtgccagggaatgatttccagagggtatgaaaatatttgaggaattgagcaatgtttagagttagccaggtgaaggagggacaggagagtaaacagcatgaacagcatgtgcaaaagattgcggaaaaaaactggaacacacagcccatctggggaaatgcaagtagctcagaaaggttagagtatagaatgtgttgggaggggagttgggtggggaatagcaaaaggtagaagtggagataggagcctgctttgtaataagcttgtttgcaacctatttcaagggtttatgacacactcagacacacatgcacacactaaaccatagagacagggtaagccagaggcagggccagaaataaccagatcgaatgtttgcccgattatctattttaacttggctttttattaaattaaacagaatctctccgggatggaaatccttggctcttaggttcattgggtcccttctgcaccagtctctgccagtttcattgagtctgttctgcaccagtctgttggtttcaatatcccaccaactcctatcccacctatccctactttggatgaatggatggttaggataagtttgggatgttatctcaatggaaataagaagccaaaattttcagcatctgccaccacttctctccaagtaatatgataaaaatcactggacagaacctggctttgtgaataattttctgagagaaccgagtgaatctttggcctttatttttctgtccataaaataaggaagagaataaatgtgccgggtatctgaaaaagtgatagtgaaaaacagaaaaggaaagaaaaagtaaaataaaaatcagggttattcccagaagaactgggtcctgaatggaatcaggatgcaatactccccaaattctcccaacaagtatctcaaatacgtgacaactttatgtacataaatgatggtcaaaatgaacattaagactgttctaaatgaagcatcctgagaaaaaacaacgggggaggatgagttaattcctaacaaagctatcttatatgtagcgaataatttctaccttcctataccctatatataacccctcagttacgagaagttcatgacaattgtctgctttgcatctgaaatttatcttactcctcaatgcagcctctagccccccactgcatttttgtgataatatattacaggtggaatgaactgcaaattatgctcaacttaagagttgtaactggtggaggaaaggggctcgctggtgattaaaatctagagatggctccagtttcaggaaatatggaccaagcactgtcacactgactttctcactatgtgcagctgtaagtcccgaaccaaatgcatgaagtagttattcagagcctgtgaaaaataactagtagcaggtaaactaggaaaaaggattagagtgtgatgtgccattgaactgggaatgtgaacggatttaccatcttttctcttatggtatctccaatatggaatcaaggaagcttgaaaccaacagggatccatgcagacagagagagctctaggagaatccctctagttctgtatcaagaagcaggaatgaagtatcctaatattcagggagagtgggggaaaatctcccatttttaaattttttgttcattaatttctgatttttttaattctcctcatcccagtccccagtgcctgtagtggtagcaacagtaatggaagagaggacccatggaagcctaaaattctgaacctttctttcttatcagaggagtagtgggtccaaaggggtggagatctttccctattattttcttcctctctctgctcttctgcagtttttcaggcatgttacagaaagtatatagtagagcaaggcacatgaaaccccatcttgctgatcatagaaccaaaaagagagagcctcaggaagcctgaaagtataaggataatctcaaagaggaaggaactcaggaaagagaactggacttcatacaggtgtttatgaattcccaagctcacctacaaattgtgtatgtgtgaatctgacactaaacagaaaaccaaaggctttgggaactataattcaggatatactaccatccaagtccccaactggccatagggtggagcccacatgtgacagatccaaatagcactgtgaaggcattgaaaatgtagccagcactaaaacaccatccatagaaggctgatgagaccttcaacctgaactcagatggttgactgccttttaaagtaaatatattgatattcgtcgtaagatttacttaagtcccaaagtctcatatgataatattcaatataattaaaacacaacagaaatgcatataaaaatttagaaaattctcagttcagatggaaaatgacagtcaacagaagtgaatgatgagataatacagatattggagttatcttatgaagactataaagcagccatcataaaaatgctctaagaagtaagagtaatacccttgaaataaatgaaaagatagaaggtatcagtaaaaccatagaagacacacagaataatcaaatggaagttttaaactgaaaaatactactaataaaaattttaaacttactgaaaaggatgcatagcagaataaaatgacattggaaagagccagtcaacttgaaaatagataaatagaaattatccagtcctcaatagagagggaaaaaaaattcaaaaatgaacagagactcagagaactataagatagtaggaaaaggtttagcatttgtgtcataagcatcccagagagaagggaaagaatacaatgcagaaaaataaataaataaataatagtgaaaacttctttaatttggcaaaagatataatcttgtagatttaagaagctcaacaagtcccagaaagaataaatccaaaggctgggcacagtggctcacacctgtaatcctagcactttgggaggccaaggcgagtggatcatctgagttcaggagttcaagaccagcctggccaacatggtgaaaccccgtctctacaaaaatacaaaaattagctatgcctgatggcaggtgcctgtaatcccagctactcaggaggctgaggtgggagaatcatgaatcgcttgaacccaggaggcagacattgcagtgagctgagatcatgccattgcactccagcctgggtgacagagtgagactccatctaaaaaaaaaaaaaaaaatccaaaaagtccacacccaaatacatcctttaaaagtggctgaaaactaaatacacaacaaaaatttttgaaaacagccaaataaaaatgaaaacaaagtgaaacataaatattaacataatacaatgattcaaatggctagactggctcatgcctgtcatcccaacatcttcagaggccaaggtgggaagactgcttaagcccagaagtccaagacagtgagactctgtctctacaaagaattttaaaaattagccaggcatggtagtatgtccctgtggtcccagctactcaggaggctgaggcaggagcatttcttgagcccaggaattcaaggctgcggtcctctgtgattgtgccactgcactccagcctgggcaacaaagtaagagcccgtctctaaagaacaaaacaaaacaaaacaaaacaaaagaaggaaagaaagagggaaaaaaaaggagaccataataaagttaatattttcaaagtcctgaaagatattactgtcaaaccagtcatatatataatgttatcttttttattttatagacaggaaaattaaagccaaatatttactgagttctcacagaaacttatccacacagccaggttctgtctaatgattttatcatattacctggaaaggagtggcagcagatgctaaaaattttggcaatatgagaaaaagataattaaaaacaaggatcttcaagcatatgaaaggtattatgtcgaggtaaaaatacagagataatttcctcagcaaaacatattgaaagaattttcttgaccctcagagttacagaactcccagaggtctatacccagtaaaaatattcttcaacactgaagctaaaacaaagatagcctcagtgaagaaaaactaagagaatgcattttcagcagatctgcttctttataaaagtaattcttccaaaagaaagaaaataataccagaaatccacttggaatatcagaaataaaggaagagcaaaataaatggtaaatatctgcataaatatagtagactatcatccccttaaattctttaaaatataattgatatctgaaacttgaaattgtaacattgctgggttttcaatatatgcagatgtgataaataagacacccacaagataagaggagaaaatgatgggaatttaatggcgacaaggtttctatatttaatttgaagtgggaaaacatgtattttaaataaactgagaaaaatatatatgtatattgtaatcactgtagcgatcattaaaaaattataccaacagatattatcaaaaatacaatggataaaatagaatactaaaagtatttaaataacccaaaataaagcaggaatatagagcaaagctatgaaaataaaaagaagaggaaacagaattaaatggtagactgaaatgcaaatataccaatattttctttaaatataagtgcattaactataccaaataaaagacagaaatgatctttaccatgaaccaactttatgctgtctaaagacactcagtctaaatataatcatacaggcaagttaaaaacgaacatgtagaaaaagttatactatgcaaacactaaataaaaggaagctgtagtggttacattagtctatgcatacattagagcaaagaaaattaccagggaaaaagaatgatattacataatcctaaatatacatgcatgtaacaaaagatattcaaaatatatgaagcaaaaaccgacagaaatgaaagaagaaataaataagtccatcatatagctgagaatatcgatacaggagtgggacagggaagggctgagtagagaaagacagggtccctagggagggctccaccctcaggtctgttcccatagacctaggtgaggacaggcactcctgttttcatgcccaaatgttgtattttccaagaccaacctggcctgccacgccctgaccctgtgcctataaaaactctgagaccctagcaggcatgcacacaaagcagctggatgtcgagagaaacacactggcagaagaacacaccagtagacaccagtagggcatctatggcgggacaacgtggaatttggttggcggtggttggaggagagtctggctgctcagcagcccccaggggaaaaccgccttcccactccatcccctttctggctccccatccatctgctgagagctacttccaccattcaataaaaccttgcactcattctccaagcccaagtgtgatttgttttttccagtacaccaaggcaagaacctcaggatacaaaaagccctctatctttgcaataaggcagagggtctaattgggctgattaacacaagccacctgaggcaaaactaaaagagcatactgtaacaaacatccactggggcttcaggagctgtaaacattcacccctagtcgctgccatggggttggagccccacaacctgcctgtctgcatgctccctctagaggtttgagcagtggggctccaaagaagggagccacacttctatcacatgccctgagaggggaataagggtacttttcccatctcaatatcagcactcctcttttaaataattgatagaactggtagataaaaaactcattgacactatagaagaactgaacaacaccattaactaactgtatctaattgacatttataaaacatttctactcaacaacagctaaatacacattcatctcaagagcacatgaaacattctccaatatggacaacatctggattcattataaaacaaaccttaacaaatttaacagaactaaattatgtaaagtatgttctctgattataatggacttcaactagaaatgaataacagaaatgtaaagggaaaatattcaaatacttgaaagttaaacaacatacttcaaaataatcaatgcaatgtagagaaagttccaaaaaaatagaaaagattttgaacaggataacaattcaaaatttacaggatgcagctaatgcagtgtttagaggaacacttatagaattaaatatgtgaaaagaagaaaattctcatatctatcatcaaaaggtcttccttaagaaacactggggaggggggagaacaaaacaggcacagcatacactgaagaaaggaattaaaaattgaaatttcaaaaattagacaaaatcagtaaaaccgaaatctgtttctttaaaaagactgatacctctggaaggctgacaaagaagaaaataaaagaaaacaggcccattactaaaattacaagtgaaagaaggatcttcctatgaccacagagtccacaaattaggtaacgggaaaaatcacttaagctgcagcactagatcaaaataatcaacattttccatttcagagtatataatatattaagtaaaattagttcagcttcaaagcaatattgatttcaggacaatgaaaatacggaagtagtctgcccagagctggcatagtgctctagcatatcagagtcactggctcctaaatttttgttgctccaccattcatggcttctattccaagatgacctctctgttcaagatggctgccagagcaaattattaaacatctattctgtccaacaggagggagaaagctacaaaaagaggtagggatcataccttgagagactctcttcagaagttgcagatcacttccactgtatcctattggctagaatttagtcacatggtcacttctaactgcaagggaggctgggaaatgtgatctgtaacccagatgcccatatctctgagtaaaataataaaggaaggagtagataaggaatgtgggtacaatctgtaatgtttggcgcatatcttatgaaagttcttctagatattatcagaacagtttgtacttcagaaactgaagttccttcagccaggaaaaaaaaaaaaatgttccttgtgggaccatattagaacctctaccttcaattcaaaattctattctgaactaagttcctgtgaataggtgatgtctgttaaactactaaagtcttgtgtttttctctcataaaataagctcctcatattcactcagaaccatccccatccattaatgttattctctgtcaccactagggacacatcagctcaaatgtaattcctatctaaaaaccattcagcagccatttggatgaagttcaaaatggggcatgtcaagggtctttcaagagtccaagaagttgaggtgtcctgctttgcactgtgacccttccttaacttctcctgccttttttgctccctgtggagcagggctaactcacaggcactacacccaaagtcggcaaatatgggctcttgacaactgtatttatactcacaaaaactcactttcaattacatgcaaattaagaggtgagtcaatgcaaattgaggggcggattatttagaactttctaggaaagggacagtaacttccaggtcattgccttggaatggtgtggtcacttccgggttgttgccatggcatttgtaatctgtcatggcactggtgggagtgtcttatgccaatgagtaatgagggcagctagggcttacttctgtagccatctgctggttcctgctggtttttccactttatcttgcctggaccagatcctgtttgggtcagaaaggttgtgacctgaaaacaaatccttctagccttctacctcatcttctcttcccctcataaccctcatccaacctaccagcaatttttttagcatgaatcttcaaaatacacgctgaatcctaccacttctcaattctatacctttgtccaaactttcctgactcttgacactttttattcttgatgtctaaaacaagacctaacactctcataggtctacatcaggagttggcaagctttgtctataaaggaccagtagcaaaggtttcagactctgcaaaacaaaaaaaaaaatatgatctctgcaactactcaactctgccattgtagcatgaaagcagtcatagataataggtaagcaagtgatcatggctgtgttccaataaaactttatttacaaaagccagcagcaggcaggatttgaactggctgtagtttgccaacccctggtctaaactcattgtgggaagtccctgcagcgtgtttttcattctttaaaacacatttttctgtcttcatttttactcgtgataacacaaccactttttttagcgcaatgttctatattttattacatgccattttcaagtacattatttcatttggtcatacacacatcacagtgactttttccatacagtgttgtagggtaatcatcctaaactcctgaaatcaatatttcttcatgtctgacctttccagataatgatctatgtgacagaattgctccacacatacccactttatccctataggaaaacgaacactctaattaatgactcctctaattaaatcttttccttcaccctgaactttagctaagaatagaaggacagccaaaccgaaaataaatcaagcttgtgtttttctttctgttagagaatatctcaggactcaatatacaatttgtttctagaagttttccatgttgggaatgagacagtcacagcattacatgggaggtaggaatataaagttatagaaaaaagaaagaatgaacatgagttaagagagaagttacaaaccaatggtacctgagttaaatccaacccagggacatgttgcttgggcttcaaagtagttttaaacaatttgagccaccactaaaaaaaagaattattttaatataaatttacatgcctcacttatctaaaaaaatacatgaggtaatagctatttctggcaccagtgggaccaaactatttcaaggtaataacaagctggagctgaacagtgccaattacttttagataaaaagtgttccccagttttccacaatctccaccactccatattatgtacttaatactgaagcaaagtattggctggcaattactattatttttgcacttttttatagtaaataaatatttttctgtgctctttttccaatgaaaatcaggaaaataataaattgagaagtccatgtaatttaagaaaaaatggaaacaagtagctcattttgttgcctgtctgaccactataggcatttgagttttcctccagtgcaggagaaagggactagcctggaaactggacttgagttctagtcttagttcttatttagtatgagggatttttaagcaaggtatataccctgttttagcctcaatttcttctccaataaaataaaagtttttgtataagttagggtgtcttcgttgtgaaaaaaaagtagttaattttatatgaatatccaaggtcatataattgattcaaaagctaaggaatcaagtttgagaaataataaggaacaaagcaagacactgcaaggaacttggcagcatcagctacagaaaaagacccattatagagcaaagtgagcattgactggggaagatgaatcctgaccattacttttacctttgcgttctttgttcactcttccaagttccagcatatgattggccaagcttggggtaggtggccttttcactggatgtaccaggtcagaaagcaggcaaatcttggagatggtgccccagagaccccttttatctcccactgcagaatagacacctaaatttccagtcccactaagacagtacatagcaggggaagaggtaatgcctcgaacagaaattgggatgccgttgggaaaggataatccatgcttcccagaccaaaaatcaaaagaaagtgttctcttttagattaagcaaaattgtatatgcagcctaaatacaaaaagcacaggaaagcacagcagctccagctgaagcagtagtgggctacctggatcccaatccactctgtgaccccctctctctacattagcccctgaagtacttctgctgacccaagatatctctgaagcacagagtaaaaactacaggatgagatgatcccttgaagctgcaattttgagatttgaatgacagaaaaattagttgagtttccactggttgactcggctcagagactctaactagatgatggctgcaagataaatcttgacaggcaactgagccatgagaattgttcccctgggaactgcaatagcactagtaaatcattctcattgactgctgatgagagaaactggcttctaggttaccaccatcagagacagggttggaaacattgacctcagtgttagcagctgaagggctcatcattgaccccttagcctctgagccctcagacatatggaatgcccccggttttggattgctgaggacatctctgtggcccacctctctcatgcacattaatatgtcttcatcctttgtttagcatgggaaaaagaaaggggaagaaaacaagctcttgtggactcttagtgtgagcaatcaacaggaagaaatgaggaatgggacaaaaatatcatattgatcaaagatttgttttgaataaccagccactctgggtagcaggcagctggaagcacattatgaaactattacagtatttatacagagctatgctaatagtgaacacaatagtgcagaaaaccccagttgcagaaatcatcaactttttggagatttcagaataatttttttctattaaggaagtatctcgacctcacaccgatctctttactgagcctctcttgggactggtgtttacatagacaaacacaggaagctcagtgagctgatcaaaagttttctccttacaaaagggtcctatttattgcattatcttaatttgttcttcatatgtgactgtgtcttactcttctgggtgaattattgctgtgttctgaatgtttgtgcccctgcccccatccacttctcaaaattcatatgttgacattctaattcccaaggtgatggtattagggggaggggtctttggttggtgatcaggtaatgaaggtggagctctcataatgggattggtgcccttataaaatactcccatgggacttcattcacctcttctaccacatggggacacagtaagaaggtgccatctatgaacaaggatgcaggccttcaccagacactgaatttgccagcatcttggtcttggactttccagcctttataattgtgaggaataaatttctgtcatttatataccactcaatgtatggcattttgttatagcagcctgaacaaactaagacagttatcaacacgaaactccactatcttgttggggggttgggggtggaaatgagccattggaggagctcagatggatattacaagtgctgtctcttacccaaaagagttcagctctccaggaagacacgagaaagaaggttggaaagttggacttagcttcatctcttcagaagtcagggactcctgactaccatcatgaaggaacatttcatcactctcttcagaggacaggccactgtaactggttctaggagtcacagtaagacatcaaaccttccttcacatagtttataggctgttctgcctggcaggatgtacatgcatcaaatgggagaacccaataaacaaatgagctgaacagccttcccaggaaaaaaacaaagccctcagatatgtgacccactgcactcaggccccatgtggccagaagaaccataaagtaccatatatagtagcacaggcactggagacatgtcaagatgtggatgtgaatccagctttatcacatataagcttcatgatctccacaatactcagttgctcagtttttccattcttgaaatggaaataaaatctcattgggcacatggaggcctgaaagagatgatgtatgttgtaaaggtcctctcacagtgcttcatgcatcgtacaccctcaataaatagtaactttcattatcatcaaccttacccaataaattgctgaatgttataaattagcctagtgattctcaaagctgaatatgcaatagaatcacctagagctatattttcaataatcttcatggactctacccaagaccagctgcatcaaatgactcaaattactgaggatggaatgtgtgtgtgtgtgtgtgtgtgtgtgtgtgtgtgtgtgcgtgcatgtgtctgcaggcgttaagctttccagatgattctgatacatgattctgatatagctcatgtctggactagaatttgagacccggtgtgcataactggagacaacctacatatgcaaatgtagttaccaccaatcagaagccacagtcacatacccagcatgatctaagagaataaggagagcagagaagcagaaagaagacacagagtcaacacatggtgaccatctcaaaaccaatctaacctatgtcaactgaagatgttatttattaaggcccttctaagcacagtctacaaataatttgcaaatctctcattattaaagggcttagctgaaagtgctaaaactacatagctaacacatgcagggaaataaaagattcctttagtaaatttaggctacataacaatttaactttctttcccacattcttttttctttcaggaatgactctctatcggcactcatttttaaaaattacatagcctacgtttgccacctacattgaaagaatcattccaggagtgactttttatcaaatttagcagtgtactgtgtaaaccagaaaccatgttgtagaaggtagaatagagaaatggctactggtgtgatcttagaaactgggaaaggctttcccgacccccttttctttgttttctaatgaaaaaaatgccttcaaagaattaatattttgtgctgtgcttttcaattctagccatgtactgttatctcctagggaatcttaaaaaattctgaactccagcttcagattttctgattcagtttagttagggtgggacccaattattgatttttttttttttttttgagacagagtcttgctctatcgcccaggctggagtgcagtggcacaagctgggctcactgcaacctccgcctactgggttcaagcgattctcctgcttcagcctcctgagtagctgggattacaggcccacaccaccacacctggctaatttttgtatttttagtagagatggggtgtcaccatgttggtcaggccggtctcgaactgctgacctcatgatctgcctgcctcggccttccaaagtgctgtgatcacaagcatgagccacggcgcctggccaattattgatatttttaaactccttggaagactccaatatacaggcaaaatttacaatgactgcttcaatgaaaatttcaaaccctgttaagaacaacaccatattctctcacattgagagaatattttaagctattaacagcttcttaggcactagtatttccaacagtttcttctgtgaggtactaaagggttgccagagaaaatataagacgcctggttaaatttaactttcatataaacaacaattatgggacatacttacaccaaaacactattcatgatcagaaatgcaaatttatccgtacgctctgtgtttttatttgctgtatctgacagacaaccctacagtaagggcatcgggaaaactggacagaatcttctagtataattggaaaaagaaagaaactgtggacatctgttggtttttcttggcattcttctctcattccacacattaattttcttcaaggaacaccccttccctcctcagtctacgtggttccagtggacacatagtctagacctgccaagcgaatcagtccttctccctggacacagtgatcagcataggcgtgatgggcgcttaaaccggccaaaccaaacagacaccattccagaacttttttatgtaactgtggggcaagaggtactctttctacaaaggtagctgagaagatagactataaaccagaagctactgggggtctccttaccatcatgtatgaagggcctctctgcataaagccaataagaaagagcagagctgggaaatgaagagagtccaagccctaatgggcccataaaggaaaattggatatccacatgcagaggaatgaaactagatccttatcttacactgtatacaaaaatcaactcaaaatgagttacagacttaaacataagacctgacactgtacacctactaaaagaaaaccgggagaaagccctatgacactggcctagggcctaggcaatgattttttttttttttttttttttttttggagacagaggcttgctctgtcacacaggctggagtgcagtggggtgatcatggctcacatcacatggcaacctccgcctcccagggtaaagcaatcctctcacctcagcctcccaagtagctgggattacgagcatgtgccaccacacttggccgatttttgtatttttagtagagacacggtttcaccatgttgatcaggctggtctcaaactcctgacctcaaaagatccactcacttcagcctcccaaagtgctggattacaggtgtgagccaccatgcctgaccagcaatgatttttttaatatgatcccaaaagcacaagcaacaaaagcaaaaatagctaagtgggattccatcaaacaatacagagtgaagacataatctatgaaaggtgaaaatagttgcaaaccatacatctgataagaggataatattaaaaatatataaggaattcaaacaataggaagaaaaccaataattcaactaatgagcctgtggatccagccatacctgaaaatctgtatcttgcactttttgtgatgccagtcaactatcttattttctagcttataccaatttgagttacttttctgccattaacccccaaaagagtcctgaataatacatataatgttacagattgaaaagctggaatcccaagataaggtttcaacctataaatgactatgtttttttaagcctatgaaatggttcttccacatgaaccagtgtttaactcccctaataactttcactgacccccactgttcctaattcactatttcatcctctgtacccctcatagcttctactttctgtcatgtcatatctcacacgttatagctatttatacccgtagcctcccccagatggtttcctgatcattgtattcctagctggagtctgacacataataggtactgaataaatgttgcttaaattaaagcaactgtataggcaggctgtgatgatgatgccttggaaagctaagttgagccacaggttgaagctattccagaagtgagggaaggtggcagaggagagagctgaccccagttgcacagaactattgcttccgtcaaccatccctgcatgtgtggaacaggacctaagctttgggctttgtgtttaatctaacctccagtgtcatcagattttttttttaccaaatgtatttgaaccacatacactattcagtttacaattacattctagaattcagtggccaatagtcatttccaggtaacctgaacaaaaatggaatcaaagttagataattagctttttccccgtggaaatggtccctagttactgaggtccactatgtgaagaaacacaaagggatgtattacgcagatgacacatgatagggtggaatctaatattgaatggtttgaagtacttggcaaccctaaaaggataaaatatcactcagagtacaaaattctcctgcttacgtgaaggatcaagtagtcctggatttcctatcagctaattgcaggatcccgagtccgtttttatagctgtgcttgcaatggcaaaaataaaaggcatgctgaagagtagtgaatgagtgaatgatgtgattttttttttttggcttcgcattcagattggatgccatgaggacacagtctcctaaaagcatgacatctgacttgctgtctcaatgtgcatctttgtagactggcacagaaattccatttgaactcccttgtgttttttataactataatgaaaatcattttccctctcaaattaaactcattacaagctctgcacaccctgtggggggcctcaaccttggccactaagaattctacactatcaggacctatggaagtacttccggtacccaacctgactgttgatctagcaaaactgactggtacttcttaaagtcatcaattaacagtaagtgaagccttaatccagcaggaacctctcactctcaggctaatcaacactttgaagtggcaaggtgtgccatggagctcatgttcagaggattccctttgaatgagtagcctctcatcttggggtgacattacaggcagtgtcagcccctgtctgaggatcttgactagaatctgccatcacaggagctccaagacgaaaagtctccatgttcccctttagaactgcccatcatccattttctctgggagatttgcttgctagttagtaaaaccatccggagcagccgtgacagggataattacagaggaagacagctcctcacacaattgttttaaataaagaatgggaggaaagcatggggaacaaagaatgctccaaaggtttgacttcaaatagcattaaaggaggacaattttaatttcctgcatgagtttattagtatccatctcctgacctaaaggagttatcaggataagagaaattcctgggagctagccacatctgactgctacaataccatagatcctggacagattccagggaacctgaagatctagtggaggagagcatatgtcccctttcttcacagaatcaaaggatctgaagtgccgggagcacttttaagtccacaccaggcaaccttccacccaacgcaacatcgcttgtcacttggtcttgctttgagtatttccaatgatggggaactgtctgctttttaagggagcgtgatctttctaaaaaacagttcaagccaggcacagtggctcatacctataatcctagcaatctgaaaggccatgacaggaggattgcttgaggccaggagttcaaggcttcagtgagctatgatagtagcactgcacttcagcctgggtgacagagcaagaacctaaaaaataaattaatcaataaaaatttaaaaatacacagttcagtttgctgaaaagttctttttaggagactaaataaaatctgtttcctagtaactttcaaatatttgtcctggttttaccacctggaataacatagcgctaatttaactcctccttcagatagtcatcctttgaccagacagcgttaccatgtcatgaatatctccaagtgttccttatatgggttagttttcagttctacatcatgctaactcactgcttcagtctctccaatgttactagtgcttttagaaactctggcaagcatctttaaaaagcaagaggggtttttccctgtatctgcccaacctagttccttaaccctgggaggagtgctgcttgaagccacacaccccagtggctcagtgagcatcatacatgttatttataaagtgaacatcatacagttatttatacagtgaacatcatactatcaattgtgtagtacaaatattgtaattgtaaagtacaatgactgggccaggcgtggggctcatgcctgtaatcccagcactttgggaggccaaggcgggtggatcacctgaggtcagaagttcgagaccaacctggccaacatggtgaaaccccatctcaccaaaaatacaaaaaaaaaaattagccaggcatggttatgcgtgcctgtaatcccagctactcgggaggctgaggtaggagaatcgctagaacctgggaggtggaggttgcagtgagccaagatcgcgccactgcactccagcctgggcaagagtgaaaactccgctccccgccccgaaaaaaaagtacaataactgactttgttccttattcaataaactttcctaaggtggcagggggtgttgtggaagagttaaaagaaacagcaagaaataacccaggagacccttggttattacttctttgaggccaacaaaaaataatccatttggttggcaaattagcatttattggagaataactgctgagaaaatagaaataatttggcagcatgctggtcgcagttggctattcttgggaattctgctgtttcccagaataatacaaaagtaatctgggactgtccaagacacaaggactctcaagcaggacagtgaatttgtagtattctcttttcatggtgtgtagcatcacaaatgatgctctcacataaacccgtgggtggccctcaaatgtccatgtgtgtttctttgctggtaacatgactcgggggcattctgtggctgcgtttccatgtcctatgggctccacccttttaaactgaattgattcacccttgaggttaaaaatcagtcaaacaagtgttgacatggtctttgagtctctttcctgcaaagactaatctaaccagctagactgccattgattcccccctccctttgccaatattgacaatggagggcaaacagcatctcaggaatagatctgtccatttgcctgggcctggagccccaggtcagcaatgttaaagcccaacacaccagcaaaggttaaaagataagcccccagtgtattgagctgtgtttgttgttttgacaaagtagagagtttaaggacatagaaggcagttcatttctcctgtcagtgtcactgcagaagatggatgttttttgggaacaggagccagagagccaagaaccttggcataaggccaaaccgtattgtccacatcagtgattaagggaatcaatccctagtactcatgctgctgagctgacttataagaggctgcaatcagaaatccagagccacagggtggctggcctgggcctggtctccatcaagtactaaagtcagctgttctgagattcttccaaacagaaggccaggtgaccagcgaggctgtggcccagcagaacctatgtcttgggtttacaatgatggagtgaatcagggctctctcactgttttctgccctgtaagtgatctgtttcacagcatccctatgagaaatgggcgtggacacagtgctgccctgtagactcacactggataagtcacagcaagttcttcttgaggatgtcatttatttccttacactgtgttgattttgtgccgaacactagctttaaacaatatcgtagtttccagattaggaggagaatgagtgcaaggctttcagatagatatttaacagtacttgaatgttttctatatattctctctatataatatatacacatatatatataaacagacatgttgtgtataatgtataacatatgttatatatacataacatatgtatatgtaaacacagatatacaacatatatacacatatatacacacatacacatacatacatatgcatgttttattattacagtacatatataatattttatatatttgtagtagtatcttccagacttcattttatattaaagtaattcacaaatgtcattctctttcctatttattatcagtgcctcaggggcaggggccatgaatacccccagggcattctaggatggtttcttatacattgtaggcattccatcagtattagttcaattgttatttcagttagatgggtctatacccgctactgctctgtgctgtctctttataaagccatttgctacacccgatttcctgcccattgtctgggtaagcctatttgtctttcttatcccatcttttccatccttttttcctagagaggaggccaattttgttctttcgcctatcatccccttcccacaaagagggaacttgaagctacctcttgttgcagcgtttactccgtaactccagaaaattacttaaagcatcatcagctaaatactgtcctttgagggttgaaagtggtcatttggttttatgaacaagggatgcaacttgcttacttctcttcctagaactttaaacagtagagattaactgatagctcattgtagttttcatacaggcttagcagactcgcaattttgtaaccaaatgtgcatcttcttcactaaaatattcatcactgtacttagtttccactttttgccaatttggtttatatctctcatttgtcatgactaataaagaagaaatgccctcttctgctatctctgcctcctcctctagttattgctgctagaggaataacagctagaggaatgcaatgacatgtatccagtaaacattgtctcttagagtaattcaccaaggaggccttcctccatgaaattaatctcttgaaaaatactgacaatttacactttgagtctctaaatcattttgcctactagcattttgaaatgcttaactgatatatgtagaatgccctgcattagtatatactaaataattatttattgacttaataaataaaaaacctattttaaggatcctttaccatccaatccaagcccttctgacacccaccactttgttaatgcttcttctttctactagactagacagcccctgtgggtgtctttttaaaaacactgtaattagatatttgcttgtttattaatttgacaaatatttaattactattctggatggcacttagtagacacacaatgaacaaataatttgttgaatgaattaatggaagagtagtgagagatctaaataccatgtcctataagagacatttgacaccacagcaagatttcaacccagaaagagaggctcttagaagccttagaggctctgagaggttttcagacacctgtctaaaaatatttgaaggattgtcacggatcttgtctttttaaagtttgatatgttttttatctttttttactagtttgcttttttaaatacttcattaaaatattatttaacttgattaataagctttttggcatcgctttgaattctgtccataaggtaggtgccccagtaacctcacttaagactgagccccacatgtgatatttactctacgggctcagtaatttcccatctccacatattcaaatcatgcatctttcgaagctcatattagggttttgagggaagggtgtgtgaagactgttagttggcacttggatcggggaacctggtatattcaaatgacttctttatcacagaggctcaacagggaatatgcaaagggaacaatgacagatcagattggaactcaaagtcatcacttaattttgatcttgtggcaaaaaatattggaacactggtgcagatccaagccctaaggaagacttggctatagactgtgatggttaatactgagtgtcaacttgattggattgaaggatgcaaagtattgatcctgggtgtgtctgtgagggtgttgccaaaggagactaacatttgagtcagtgcgctgggaaagtcagacccacccttaatctgagtgggcaccatctaatcagctgccagcatggctagaatataaagcgggcagaaaaatgtgaaaagactagacttgcctagcctcccagccaacatctttctcccatgctggatgcttcctgccctcaaacaacagactctaggttctttagttttgggatttggactggctttccttgcttctcagcttacaaacagcctattgtaggaccccatgattgtgtgagttaatacttaataaatgccttgttctcttggaaaacttagtcacagacatggacacagggagaacgccatgtgaagagaaccagggagaagatggccatctgcaacccaaggagagtgtcctggaacagatccttccctcacagccctcaggagagctgccaacaccttgatctcaaacatctagccttcagaactgagaacataaatttctattttataagccacccagtctgtggaattttgttaagttatagcagccctagaaaactaatatggacttttactccactgtaataccaaagttatatcttaccacagtcattctaaaacgaggctaaagtaaccaggatacaaaggtccttgagaggaagagactggcaagcaagatggcagcctctgacaggaattatccgttcagcctacacatctattggtgataggattgctggagatgaaagagagtacagtgcccagatcaatagaaatttacctatatggaaacaggaaaggagagagaccactgcatcatgcatttgatctaacttgatgttctttggacctaccccctaggaaatgtgagccatccatggcccaaggtttaatcaattctgtatacctccccatccagagaaacgaaaagatggtagaggaagaaaaatagacttcttcctccctaaggctcagttcaaatgttacttctgaaaaaagctttaagttttacactcatcttcattcccaaagctggaagtaaattcattaatctctagactcccacatcatttaccaatttcttttttcctatggaacttagcactcttttataactaccatttactgagccaggcaacaggagtcattggatcttaaaaacaatcctatggggccaggtgcagtggctcacacttgtaattcaagcactttgggaggccgaggtgggtggatcatgaggtcaggagttcgagaccagcctgaccaatgtagtgaaacccccgtctcaattaaaaatataaaaattagccaggtgtggtggtacgcgcctgtaatcccagctactgagtaggctgaggcaggagaatcaccagaacccaggaggtggaaggttgcagtgagcgagattgtgccgctgcactccagcctggatgacagagcaagactctgcctcaaaacaaacaaccaaaaaaaaaaaaactccaactctctgggttaagtattcccccacaccactgtaataggtcttaaaataacttatttcaacaaacatgtacagagaatctagtatgttttatcaaatctgtatacctgagggccctaaaaatgccctcaagaagagtcaaggacatttatggagaatgcagtagagacagttttttcattgaaagtggttaggttttcttactgtgaaaaaaattgtagtaagataattgactctgtaatcagtgaccacagcatgaagccctttccacacatattctgttccatcaggagacaggccagaagctgtgggcctcttggaaggaaagtttcactgagctgatgcaggcttttgagtggctacacttgggaactcattcatttcttctgtttagaaaaatgcttataatattgatgtactgctagtctgactgatgacttagggaaatcaacaaaaggaggctctcttcactcctcctcccaccctaagccctccaacctatacacagacactaagcagccaccatattttctcctttaaaagcattttttccctttttttaattgaaagttttgcttggggtctaaaatttaaatctacgcttccacctagaagagctcttctggactgtcaaatttataagttcaatgctaaacttcccacaacaaagggatcacagcacatttagaaaatagcaagggaaataacactgaaaaacctttctttctctgttctggtcacttaaagaatagaccaagagcagccagtgttgtttagaagcacctattggctggattgagaagctattaatttaatccaagtgttacattggctagaagttctttctttaagataacatatccctgatgatcaataatggccagaattttcagttagttttaagttcctaggtctttacaataagatttaaaaaatcttccagcaagaaactcagttttaagatatgtatcagtcatgaaagtaaaactaagtggatttctccatcccctctctgggcctgttgccagaattagccattttattagaggacacttttcacaatgctttcggttgactttttcttttttcagggatgagggtgtcatgttatagaggggtgaaggccaagatcctggattcagactacccacgttcaaatcttggctttgcctctgactagctgtgtggatttaagcatgttgcttaacttctccaggcttcagcctttcttctctaaacaaaagtactaattatggcaactctctctctctctctctttctgattttcagtgtgtgtgcacgagtgtttgttaccttctgcatgcataagttacctggaaaaaaccccagaacccaagaagaaatgaaaaaattgaaaacagaaagtataggttttggtaatagctctttccttcagcaaccgtgaccttgtgcctatctttctgtgccttggtttacccttttggaaaatggagaatggttgctaagttaggagaggtcttccttacagtctcttcttcttcagaaatatcataacaagttcatatctgtaagtggaatataaatacaattttagggattgtggctgggcctaaatattaaatacaagaataatcttagagcaaggaaaaaaaaattaattccacgtttgaaagacttctctaaaacccaaatttgtattcatttagtaataaaccaacatttccaatatatgtatatttatcaaaaactattttaattaccaatttatcatgatgtatcaaatgaaaactgtatattatgttaaaagcaaaagacaaaaaaagctattaaaataaggctttgtcagcctgtacaagactataaggataaaggcataatttcttgacattttttatgtatacaaagtagttcagagaccttaccatcattttggacctctcgaggttagggaaccccaagttgagagccatttgcttataaaaccctgagtcagtgctgagaaagcaataatggcctgcccacaattgtgtaagtaataatgatattactaatcatttacaagagcccactagggattttggaaataacctcaaagcaattaactaatgacctacctttgattatatctccagctttgaaagcaaaaggttagagttcctatgccaaactgatgtggagggagtgacagagcacggtggccagctctcttcctgaatacatcacataactcctacctgcttaatctcccttccgagtgcacttccagaagatggtaatctttatagccttttaacatttttataacgtcttttttcattctaattgaaactattgctcagtgcagaaaacttggaaactacagaaagacatgaggctacaaaatgttacccataatcccgtcatgctccccaaaattacttttaacttttttgtgtttgtctctctaatttttctcatagaaatgtatactttactaaaaaagcaacaaactattaacatggctgtttcacctgcattttaatcacaacacattttgagcatgttttcataacaataggtgttttatgtggttgtacaatcttttatttaactaatttccttctgttggacatttaggcagttcaaagtgtctcactctgtaaataatacagagattctgttatttcattcgcttattgacacccccttagtacgtctcttttcatagaaaaagcagttccttcctactaacgtatttacattgatagaataaaattttacaaaaggaaacaacatcaacgacatatacacggttcgattttgcagatatttccccctagaactattattttaatttttattctctttggaaatatacttgaaagtgctattcacagctcaaaagttactgattttaataatatttacatattatgtgtaataataaatacatctgatgatatttttacttgcctttctttgatttttaatcaggttgaatatttttaatatggcaattggtgatttcgtatctattttttattgaatcacaatatatgtcctttgaatatttttctaccaagatattaacattttcccatttttttaattgttttctttattggcatattattgtattgttgtattattgtggttatctctacaacttggtagatacaaagctagctcatcttttataaagattgccttaaaaagtgtcttatgtacatacacaaaatggacacttttacataaattgaatcataccatgcatgacatgatttataatgctattttttcttgcttctctccacccctcaagttcacccacatcttcaccgacacacccacaataacccatgttaatgacctagtatttatttttcttatttttctcaattttcacaattacatttcaatatgtacagataaaatatatacatgtacagggttttgtcatttatgatttcacataaatgatagtatatgaaacattttctgcatcttcttttactctctcaaggatacctcataaaaatcctgccaaggtaattggtgtaattctaattcattcttcttaatagccacataagcttccctggggtggatggaccacaatttattcagccattcccctattactgccattcactttgtttctaaatttttgcaactacaaatggggctgcaataaacatctttgaggagatttgcttacttatgggtgtttttattttgataggatcgattcacaggacgagtattgctgagtcaaagagcatgttcaatttatttttattttaatggatgctgccagattgcttcctaaaaaggctataacaattcatagttccactggcaatgtataagaaatttcctatatctgcattagcaatatgtattgtagctcttttcaatttttttaagtctaaagagtggaaacatatggtcgaccattcatgagctcaaatgacatacgatttattgaacatttgaatttcacatctctaaatccatttatttcttggtactttttaaaattttttcatgtcaacttgtatattttctgtatactatagagtttaatactttgtcagctgtactgcaaataactttgttccagagttcacgcatgtatatatactttgcttgtggaagtgtttcttaaattctctgtgccaaaggcccagtattggagaatatttccaatctatagcaaatcattgttttgtaaaacacaaaatcacacacttggatgtcatagcaatatcgaatgtctataaaagtccataaatgcttattctcagtttctgtacttgcctaggaatgggttggtagcacatggcagactggacagctctacaaatttacagacaggtctaagtgacactagtttgtgtcatccttttttttaatcaaaactttcacttttacatagtcaaatatagttccttctatagtttctagactttgtctcttaaaatagtttaaggtctgtttctaggaattatattgctaagatgattctatttaagtctcaaatacatgtagattgtttttctaattgtatcctatcttttccccttttttgtctggattttttaaccatatgggatgaagtccagtgctattttctttcagaagtgctgccgtgctaccttggtcgttgcggaagatattgtgatctggctcattcagctgccactcccttctagtttgccttcttatacagtctgaggctaaaggcaaaaatcctgcattcttagatccagttgtactattgttacatatgagatgaacatgccagcaaacagacacacccaagcaagtcttacagcagagaggtcaatatgataagtagttgtacaaaagaatgtttattctcttagaaagcacagtgaaattgtctgggcacagtggctcacacttgtaatcccggcactttgggaggccaaggctggtggatcacctgaggttaggcgttcaagaccagcctgaccaacatggtgaaaccctgtctctacaaacatacaaaaaaattagccgggcatgatggcggatgcctataatcccagctactcaggaggctgaggcgggagaatcacttgaacccaggaggcagaggttgcagtgagctgagatcatgccattgcactccagcctgggtgacagagcgagactctgaaaaaaaaaaaagaaggaagggaaaggaagggaagtgaagggaagggaagggagaaaggaacgaaggaaggaaggaaggaaggaaggaaggaaggaaggaaggaaggaataaataaataaatattttggaccagggacggtggctcacacctctaatcctagcactttgggaggccaagatgggtggatcacaagatcaggaattcgagaccagcctggccaacatggtgaaaccccatctctactaaaaatacaaaaattagccggatgtggtggcaggtgcctgtaatcccagctactcaggaagctgaggcaggagcatcatttgaacctgggaggcggagagtgcagtgagccgaggttgtgccactgcactccagcctgggtgacagggggagactctgtctcaaaaaaagaaagaaagagaaagaaagaaagaaggaaggaaggaaggaaagaaagaaagaaagaaagaaagaaagaaagaaagaaagaaagaaagagagagaaagaaggaaagaaagaagaaagaaagaaagaaagaaagaaagaaaaagaaggaaggaaggaaggaaggaaggaaggaaggaaggaaggaaggaaggaaggaaggaaggaagggagagagagagaaagaaagaaaaaaatattttgctctgttggggtagctgtgaggggatttctcaagttcttatatcataaattccagtcaataagagtagcagcaatgctacttccgtttgaaatgtctcatgtatggtgaaccctcttcctggctgcataacatccaagcagttctttcatctagaaatctacctaacctatcctagcagatccccttcatttgaactagctagagtaaattctgttgtctgcaacaaaaagccttgaccaaaaatcatatattaaatgatctcatatactgagacactttactatagttgctcttttgtttccttgatccgttttgaatggattccatatcattaagttcataccagtaacactgatcttaccatgtcctgagatgtttatcttatttgctcttcttaggaatttatactttcatttggactttaagataattgtatcaccttaagtcaacaaacagaaagagaaacagaaacagaaaccccagctgagtaaaagtaagaagcttccctaaatccaagctacaatatatgaagacaaagactgaatgaagaaatggaaagtgactcaaaagctaaggagagtcaaaccaaggcactcatggagtagcatactaatcatcaacctgaggaccttggaaaactaacaaaccaatggcactaggtccagccaaagatcatggcgggagtgctatataaaagcataaaaaagaaataattaaactcctaaatatccaccccctcccctgctccaacagagttaggcaacaacccttcttcttcctctgtaggaatgggaggtgtattctctaaagaaaatgtcctacagaacctttgcacttggtgtcaccagacatagaaacagatagagatgaggtctagggcaggagtcagcaaactttttctgtgaagatccagatagcaaatattttaggtcttatgagcgatctggtctctgctgtaactattcagttctgaaattgtatcgccaaagcagccatagacaacacttaaacaaatgggtgttgctgtgtatcacaaaacctttacaaaaaagatggtgggctggatttggtcacttgcccatagtttatagacacctgctctagggaggtaccaggagttttaagaaaaagtctacatgctgaacagggaaactctcagtcatctttctctgacctcttcctctgttagatttattgaccacaccccactttctactagccttcatcctcccctttcccttgccaaaaaagtaaactagtaaagaggaatattattctctcagtcccttttccaatggtgcctctaatttttccaaactcttactgaaaattgacctattcgaacttcctacttcttgagtacagtttggtgaattatgttttgttaagaaataatccctttttctaggattttagaaaatcctagaaaaagtattgccataggagttggatgtggggtttttatgaacattttaattttttctatatctgtgaaaatatctcctttcttattttcaatattgtatatttttactctcattctttctttttaagtagtcaaactcacaagaagttgatttatattgttggtcttttcaatgaaccagcatttgaatttgtttattcttcttatgatttgtttccatttcaataaatacttgttaaacaaataaatggcagtcatcagcaaatagtttgttgttacagatcatctgagagaaaatgtgttgagtgagaaagaaggagccctcttaagaacaccagtatctaagggttgggcagaaagaaaacaataacagaaaaaaaaggagattgagaagaaacaatctgatctgattaaattggagaaaaaccagaaaagcacagtgtcacagacaccgagataaaagtgttttaataaggagaaccttgtcaacagtgccaaatgctgcccagaggggatttcttgcctaaggacttagaagtgttccttaacatgagctacaagtaggatgacccttgcaagggcaggagtaaaagtcagatttcaacgagtagaagtacaagaaaaaagtgagaaagtaaagataacaagtaaagattacagataactctcaaaacagatctttggggaccataagacatgcaatagagagaaacttttataaagatttgaaaatctcaagcatatttaaatatggacagaaagaagccagtcaagggttgggtggaagatccagaggaagaaatgtcaggcagagcacagatgcagatattagacccacatctgagaaagatgcccgttcccttatgacaacaaggcaggaggataatatatctgtggaccagcgtgggtgagcatgtttttatagacatagttggaagtatcaaaaaactaaaggatttgaaatcgctacagtaagttttggaggaaaaagataacttaggaatggagaagaatgacctgtcagcactgagagccttgttaagcttggagacctcacagttatgaaaacacaaagcctaggggtgagggtaaacagaggatggatccaggcttgcctgttggcgtgacagtcccaggtgataaccagtgatacttgggagattctcacagctcctctggctctgcccactctgcaccaaagcagccacaacgcaaaagctttctcttctactttttctacagaagggaaagaaataagcctctactgcacttattggaataaattccctttctgcttctcagtgccaacttttaaatcgtgggcttggggagtgaagaatcctaaggtttccttcctcgtactgagatgggattgttcccttgacccccttcatgggtagaaattggagtggctcctttcactcagccggcctctggccactccaggcaagagggagcaggcaagcaagcaagtccaggaactagagggaatgaaggctgaaaccagccagtcgctcctctctggtgggagcaggctctgtgccgccctgcagcagcgtccaagtccctgctctcccaacacctaggttcttgtccggtgtccagaaaaaatcaggttgtgcaaatggattgaagggtagtgtatgtggaggattttattgggtgatggctgtcatcaggatgggagttggaaaggcgatggtgcagaaagaagacgatctttccctaagccacacctctgaagttatccacgtctatccatagtctgcaacactcagccactcatatccccgacgttcagcagcttggatccccaatgcccagctgcttgcatccccaaccgcttgcattgactatttgcatcagccactgtgttgctctgccagctgaagtcttttcatgggcacaggataggggcacggcaggccagaaaagcaacatttgggcagacaaatggggtcagcttttttgcacttagggtggtggttctaggcttaggggtggggtctagtggggagcctggagcccagtcattctatatcatctccccgctctgaagaggcacatctaagtgcctttagaatatggacaacgaccggtcttagctacttcctgctgaaaggggacactgtttgcagaaaatggcaatcagattcctcccagagatttacctaaggatccccggcaaaagggagccatcgtccgaggctctggctgcctgcctatttggagccctgatggcctccaggagagagaaaaaaacaagctttacaaggttaaatatgcatggatcaaacgtgcattatgcaaggaaagaatttattgccaaagattacagaaataagaagtgaaatatactaacaagattgtaccccaagctgtctcaccccggtgaaaaaaattaaatcttgtatgggagtggttacactttgagagagagaactgttcttgccacatctgtagtggttaacaggtgaacgttaggaattctggggttcatgggcttgcacggtggtcattaaagcttctgcctctttcttatatctaaaagaccaaggtggccactttcaggagatcctctaaagtactatctagacccagggtctgtttctgagtagaaactggagatgataaagtttgttggttgtccattctgaaagacaggcaatttggggcatccctcattcccttccttcttttagcaaaaacttggggtgtgagggagaaagaaagagggtgttccccccttttcttttctatctccatccccgagtcccagtgaccttggcaggtgccacccatgggtgccaaagcggcttgcaccgatgaagcaggggggcctagcgggtgggagtacccgctcttatccacatacaccctatctcccctgctgtcaacagctttaagttccctggttctcacctatgccatggagcatggccttcttccatgaagcagggtttttgttggcaggaattgatcctgcccatttacattgcgcatgttgcctggctttggatccctcagatctcgttttcctttccagggcctcaacctgaagcttggaatcaagtttgagattaaaaaagggtatttgaagggctgcagagattcacttagattaagtcccacaggctttggcaaatttacagctaccagccacgaaggtttcctcctctgtcattttcctatcataagcagagtgctgaggtaggaagagaaccctctcccttagaaaaacagaaaaacaacttaaagggcataagggcagtgggtggggttgaaggaagagcctctgctctgtggaaatgggttcctttaatcactgtatcccttccccacttcagaccagctagacctccataaagggaaaaagagccaatattccttttaccaggtggaaagagagaggtggcagggtcttgaaaaaaaggcagatccgacaggcccgcatgttaactaaccatctgttgtatcccagatgggcccctagatgagatgggattgttcccttggcctcctttgtgggcagaaactggagtggctcttttcagtcagtccgcctctggccactcccaacgagagggaacattgagagcaagtgattgtgggaaccagaggtaacaaacgctggatctgtccagtcactcctctctggtgggagcaggctctgtgtgtgtgtggcccgcagcagcgtccaagcctctgccctcttggcacctgggttcttgtccagcatccaggaaaaattaggtcacatgaacgtattgaagggtagtgtagcgtatgtggaagattttattgggtaatggttctcagtgggatgggagtgggaaagggtatggtgtggaaagaagatctttccctggggccacaccatctgaagttagccgcttctatccttagtctccaccactcagccacttgtatccccaatgttcagaagcttgtatccctaaagctcagctgctcgcatccctaaccactagcatcatccatttgtgttgctctgccagttgaagtctttttatgggcacaggataggggcgtggcaggccaaaatgcaacatttgggtggaaaaacagggtcaggtgttttcacttagggccgtggttccaggtttaagggtggggtttagccaggagcccagccattctgtatcactactttggagtggcaacactgggataggcagcctctgataaaactatccttgacctgaaaaagctagagataagaaggacatgaactgagatgggtcttttgtcacatgagccaggtcttatttttctttattgctgtagaaactgttcatcttggctttattttctgtgagttattattcaattttataaaagaaacacaaacatgttatgtatgtatgtttatatgtgtgcatatatatatgtgtatatatgtgtatatatatgtgtatatatatgtgaatatatatatatattctgtgcaaagatcctgtagacaaactagttacatgcataggaaaaagacttaatggatatatgaaatatgatagtagaaaatgaaagcttttcttcttcatatttgagccatgaacatgtactcatttgtaatgagaagaaaatcaataaaatgtatttttaaagtcaacacatttgaacaaatatttttctagcagccacgttcaaaaaaccatattctggtctcatttctttgcattcaggaagcacttttcaaatatatcttcgacgttcctgatttgattttcatagaataattctgctttgaatgaatttttaaattccattagagcatgtttacttacctgaaattctttccttatctaatttctttataatttctgatttatctcaatctgttcccctctcagctcaaatttcttatcattcatctttcatctcatttgtccatgtttccttgagccgtgagagtacaaggcacatgctggtgaatagtttcttctgtttattgcagtaatattttaaaaacgatatttccttctattttttcctttatgttatagcattacttcataggctccctactggtttgcatttaatttcctcatccttaaatgataggagatacatcaagaactatttattccaagataaggcattctgcacactgtctgcttgcaagctgttaaacgcagggtctgagatgtgagcctccaattttgaaccagttcaatgattcccagcattgtgggaagagtgggccagaggaagttcccctcagccaggaggtgttctggttttcagtgaagtctgtatgctgggggccagacagtatagcttgacttccttttaatttctttggtaagaagtcctgacccagtgatgagaagaccttccattgccaccatgctcaagaacttctggtagcagcccttgaccccctgacctccagctgaaatttcttctgacctcctctggttactttccagtgccaccccttgcaactccaaagaaactgactctaaacagaggttgatccccagccactgctctggtggagctgaaaggtttccatgtggaagcccctgactaccaccaaccagttcaggcgagagacctgaatcctttcccccttttctttttaccttttctgaatcctattccttttttccttttcctgagttcttttttttttttcctttttcagccactgctaagccctttgtatggtgttgatgcctgtgtcctggacacagctgctcttagatctttccttccttttgttctggggtgtcacccttgcatccctcctattcagtagctgctacagtccccatcaaagttgtcctggagctcaccctgcagacacataagattctaagaggagtgtttgcccacctcacatcctgtctccaactccactccttgcctccaggtgaggggtgctcatggagtttaaaatccctgatttctgtcatttatcaaaccctgttgaccttttcttcatataaacccatcaatattttatctagaagaaaccactgtacatttctaatatgtcattcatattctcctagctgtagtaagaatgcagatatggtgcctaagttcgaggcaggagaatagggtctggaggcagggaatctaaggccaattcatgctgacttcctagaactaaactgataagggaaaaccccaaattttcacgcctaagtaacaaaaggaccagatgctactcactttgcaaccccaccacctcttctgcacggcagatggaaatattaaagtacctctgattggctgctttccaaaaccaatcagatggttgcataggagtgtaactttgtaacttcatgttagcctctgatggttgctttctgcaaccaatcagattgattgagggccaccacttcatttgcatggggtggacaccagtggccaatgggaaacctctagggggtagttggaccccagaagattctgtaaccggggctcttgagccactgcttaggcctgctcccaccttgtagaatgtactttcattttcaataaatcgctgcttttgttgcttattccttccttgtttgctgtgcattttgtccgattctttgttcaaaatgcaaagaacctgaacaacttgcagtcaagaccctttaccgttatgttacccttaacatattttggagagccaaccggaagataagcccaaagttagggatttatttttctcctttccccttttcttctctgctgcatacaggggaatctttttttctctctctcttttcctttccaactcagggagctcgatggacagcgccaaagcacggaggcaactgcaagttgctggccagggccactctctggtgaaacagaaaggtttccatgtggaagcccctgaccaccacccagttcaggtgagggacctgagtcctttcccttttttttcctttttctgaatcctattcctttttccctttttctgagttcattttttattcctttttcagtgtttcggctgctatttcctagtagctcccttgtacgtgagggcaactggccgggaccactgtctggtgctgtctgaaggccaaggaatgaacaaggatgactgcccggcccaaaaaaggaaaagactattttctaccctttctagttatagtccctggtccctacgtgtgatgcagcgggcagtggcagcttgtccagggtgaactcacacaggtttcaggcaacttgaaccttcttttcttatgctaaattcttcccttcccctacttgactggcaaaggacaaaaaacccacctagctatgcaaaaaagattatacaactagttgtttaaagagagagttgtttagggcaagtcacagggtccaggcatgttgtaggtggtgtatgtgggtcatgggttgggggggatccatgagaaagggaatttatgcaggaactgacaggtgggtttattgctttaatttacagagttaaaaggttgctttaagtgggatagaaaaaccttgaagaaagttcatagcaggtcatcagtggtgaagggaaccagtccaaagtggtgccagcacccatctaagttcagagacatttgatggactaagtcaggaccctaaactgaaggcacccctggggactccagtcagggcctagaatttttccagggggatgacccaggtaaaatttgagtcacttgataaaccctccacttttcaaagtcctcttcccttttccaggccactatggacaactctgaatctattccacctgattcctcgcttgactacatcctccaccattggaagcaatttgaccctgacaatgtaaagagaaggagcatatttttttttctgcaatactatctggccccattatgagctgcccagccaagaacaatgggcagtcaacggtagccttcattatgacaccatcctgcaattagacctattttgcaagaggcagggcaaaaggtcagaaatcccataaatacaggctttcatgaccctataccaaaacctaacaatctgcaaaactcccagaacccaccccctaaagggaagttctaaggcacagctcaatattatagatgatcccattttacaaggaccacctgtctctcagagtaaatagcaactgcccccatatagccccttgccaaggctcctgaggctaaaacccaggagcaaacactgggaaccctactaagtccccctcacacttggaggggaacaccttattcaactctccctccagacctgctaccccttagggaagtagcaggaaccaaggggcctgtcctagtgcaggcccccttctctataactgatatacaacaatgtaaggggaagctattctgagattcctaggaaatgtgcagatgggttccaaattttgaccttagcctttgaactctcatggagagatgttcaattcattttagcaacctgttgcactccctcagaaaaggaacgaatctttgaggccacttccccaacccgagaagtggatgaattattcacttgaaaccctcaggacaatcactggaggccagatacagttctcattactgatcctaattgggactataacacccccatgggaatgaacaaccaggctaaatttcttgaggctctccttggaggaatgagaaagggaataactaagccagtaaattataataaagtaagagaggttacacaaggcaaggaggaaaatccagccatgttttacagcaggctggaggaagcctttaagaaatatactaatctggacgtttcctttcccgaaggcaaaacattaatggcacagcatttcgtcagtcaatccaccccagttatcagacataagctgcaaaagctacagatggggccacaaactaatcaaaatcaacttcttaataccacctttatggtggtattatgacctggaggaagtaaaaagggaacagagtgaagaaaaacagcaagccaaaattatggcagacatcattggtgatgccctgaatgcccaaaaagcatttaagggaaacccgaagggccataaaccactgcccttttctgcagggcagatggaaaattggttttagaaagcaatgaatcagacgtttgtgtaggagtgtaactttgtaacctcacttcagcctctgattggttgctttctgcaaccaatcagaatgattgtaggccaccacttcatttgcatgggttaaacaccaagtggccataatgggctcttaatgccagcaaaggcttttgcttcaaatgcaaggaaaatgggcattgggcaaaggaatgtactaagcttccatcaggctcctgccatcaatgggaaggcaccagttgtgactcctggcactggagaattgactgcccctgctcccaccaaggggctcagtcaggcaaaactccagcagtgcaaaaggaggaattagatgaagactgagagggcccagggtcttcctcacccccccgtcccgtaacactgtaattactacttaggatccccaggtaactggacgtcaggggctctcaaattcagtttctttccaatacaggggtgaattaccctgtccttactgcttatgcaggcaaattttcctcctggtccatgggttttatgggattggaaggaaagccacaaacaagattctttacccctcctttgatctgtcaatttgagaaacaaatcttccacagaaatttctagtagtaccaagctgcccagtccccctgtttggaagagatattatggttaaaatagggacactactacaatttaagcatccagcctgtcacccagtctggagtgcagtggcgtgatctcgactcactgcaacctccaccaggttcaagcaattctcctgtctcagcctccctagctttagactgatccagttctcctcactttcttgcttgccgttccaagaataactgtaaaatgtgctgggaatgaaacatcctgaaatatggagggactgggaaaagcagggtgagctctgctcctgttcaaacctgcccccagaaacaaaatgtccttcaatgctttagcccagcatgtcatgtccatggggcaatacatgggaacacagggagggctgttttggggtccctcagctgcagtgctagcggggcacacacagacaagactgtcctctccaggcagctttcctgaggcttgtgggatcagcacatcacgaacactaggcttctgctgtcccttgctgcctagaaagtaataaatccatttcatgtgacttgtgtgcatggtgtgttctgtctcaccagactcagacaagttggtagccagtgcacggtgaatctacttcacagtgattctgcttcagagtactttgttcttctgtcctgaaagaactcttgggtgatatacacgctgagtgccactgcctgtcggagtcataaaggcaccttgccactctcccctttgtctacaccaggccacttgccgctgagcaatgcactggcatctcatcccctcagcatcacatctgctcatgcagctggtttagtctttcagattcaaagcgacacagacgctctgggcttcaaagcatctctgtattcccagcccaaccatttcttatattcatgactaaataatgcagcctgttgactggtgctcacccacagtgggggcgggtcttcctctcccagcccaccaactcaagtgtcagcctcctctggcaacacactcacagacacaaccagagactatgcttcatcagccatctaggcattcctcaaatccagtgaagttgatacctaatattaaccatcacatcacctaatattaaccatcaccctcactcattaacttatttatttgtttatcccttcaaaggaaatatttattgaatgccctttatatgtcaagcattgtggtagaccctgggggcatggcatctttcctcctagtgggaccttggtttttattgtttttttctttaatttttaaaatattatgtttagttggcaaataataattatatgtatttataaagtatcattgtaggaggacgagccgcaggcaaaactcctgagacacagagttaaagaaggaaggggtttattcggccgggggcatcggcgagactcctgtctcaagagctgagctccccgaatgagcaattcctgtcccttttaaaggctcacaactctaggggggtgcaagtggagagggtcgtgatcgattgagcaagcagggggtatgtgactcggggctgcatgcactggtaattagatcagaacaaaacaggatagggattttcacagtgcttttctgtgcaatgtctgtaatctatagataacataaccgattaggtcaggggttgatctttaactaccaggcctagggtgtggcgccgggctgcctgcttgtggatttcatttctgccttttagtttttactttttctttctttggaggcagaaattgggcataagacagtatgagaggtggtctcctcctttaccatgagatgttttgacatatgcatacattatggaataattaaatccagctaatgaacatattcattacctcacatgcttatctttttttactttgtagtatgaacctttaaaatctgctctcttaataattttgaaatatatattatgattaaccatagtcatcatgctgtgcaacagatctcaaaataattgggtcaaacttgtgtacccaactctctgggccaccaataaattctctcccacaagccttctcagtcccttatgcaaaattattctaagcaataacaccagaataaactcagaacattctagctgtgtaaggagtcccttagtctgtctcacagcaccctttattagagtctacgtgccttcaggacagggatcatatcttcatcaaccaaccatcctctaaaggagtatttttataaactataatttttcaatactatatgacagcatctttcaagacatggtcttggactaattgaattagattacttaggatttttaaaaaattcatgaaatacatcctgcatcagaatcactgaggatgcttgaaacgcagattcctggaccaaatcttgaaccctctaatgttgaatctgtagagttccacaggatactctgtgaagcatcctagggcattgttaacatgctccctggtgattctgaggcacgtcaaagtcaagtaggttcttcatatctgcatctgttcacacatagggaatctgcagaaattaatccttatctaaaatttattttagataaggattatgtcattgcttaaaagaaaaacttgacaataattcctctaaaacacccaagccaagggtgcagtgtgagatgagctaagaattgagatgaaatcatcaaattgttaggagattaaagcaaaataaacatggaggtgaacagaagttgggaaagaggtatccatagaaatgcagtcaaatctaagtcaggggaaccaaaggtcagtttgtgtgaccctctggggtcttgatctaaaggctttagccaagtagcaagttcagagaattttggaagcctctactgagtggtccagaaaaagctgcaaagaccttgttagggtgcagctggatcccctttgaaagactgtagcttctaggccgggcgcggtggctcacgcctgtaatcccagcactttgggaggccgaggcgggcggatcaggaggtcaggagatcgagaccacggtgaaaccccgtctctactaaaaaaaatacaagaaattagccgggcgcagtggcgggcgcctgtagtcccagctactcgggaggctgaggcaggagaatggcgtgaacccggaaggcggagcttgcagtgagcggagatcgcgccacagcactcccgcctgggcgacagaacgagactccgtctcaaaaaaaaaaaaaaaaaaaaaaaaaaagaaagactgtagcttctaccttgttactgtgtctctgctgcccttcgaggaactgtgcccgtttttcgccaaagccatgtgtgagctgagaacaggagcatgaaggcaaacgggtaagccagctcttatcattctcatctgtaaagcaaaggagatgggccaggtgtctcttctatgtctctgtcaggagtagcatttggaacctgaggaaaagtggtcagcctgacgatagaacttgagcatccattgatcccatcaacataggcttagatgcaaagatacttctgcattcacataaatcagaaaaataaaaatcaactggtgagcctcctagggagagaagagcatcaaggaaaaagcagtatttgtgattcttctgctccataggtacttctcggaagcaaaggactgatttcaaagaaatgaagggattccttgtatctcatgaaaaggcttcctgtctagcagagaggtggagaaaatgcagtcatcactgctaattccagatcatctttgagaggaggagacacctctgtgcaggacctggctcccttagagataaaaccagcttgaggaagagccagcagtctgttgagtagccccagctcacttggagaaaccattttcactggaatttttcagaggccagatctggattccagagcaactttatgaggtgctactgtaagtaatgaatgcatatttaccaaatgttccagaatttacagaagtaagtgttgaaaattcttttttgtaaatttctccagagcctgcaccagatcttaatccttgagtgggatttgagatttacaaacaggcaacagacagttgggaacagggaagatgaatcgggtcagtgcccaagcccagtaattggggtcataaaaaggtgacactttttctataatgaggatgcatcacttttatgataaatcaaagttaattttaaaaaatcagactgattccattacgtgactcaaattagccttgaaagtaatctgccaagaggaaagaaaaatggctgatagcaatggtagcaccattagaattcatagacagctgcccatagtgatgatattgtaggaaacagtcttcactagaaataccagcattttattttaaaaggtcttcatagaggtctgaaacaaacaccctgttcagagacattccaccaccgcattcaccaggtgaatgcctgacattccaccacctgcatcatgaggtggttcactgcatgaaccacctccactcaggaaacctaagatcctgaagcatcaaaatcctcagtggaacttttctgccttgactagctcaaaacacatctcaccccctcagtgggggccccagcatagtcttggtattgaggaaggttacagagactggagggaagccaggggatcagactgacttcctagtgtgagggctatatataaatggatattaatgaagagaaaaaggcccagaccatgccaacagcctccttcctagcccttctggcactggtctcgcctgccctgcacacaatcccacagcactctcagagagactctctgacagtcaggtcacacctccagtcacaggttcaaagtttgtaagggtctcatcacttttccaggagaaaatgtaagcccacttgcatggtgcagaagactttctccactgcttccctgttgatatagtttggatatttgtcccctccaaatctcatgttgaaatttgatcccccatgttggaggtggggcctgatagaaggtgctttggtcatggaggtggatgcctcatgaatgacttgatgccttacctgcataatgagtgagttctcactctattagcacatgagagagctgattgtttaaaagagtgcagcacctctcccctctctctccattgcatcatttcctcaacttccttctgcttggctccctttttctctttattattgccccaataccttctatgtgcctcacccatccttctatggcagagactagctcacccgattacaattatccaatggaaataaaactaggaattgaaatggggttgcatgataggcagaattctaggctctagaaacaccatttggtcacattcaataaaatgcaccacctggcttttcacaaccacctggttggtttctccctttggaaggaattaggccagactcaaaagaatctgatttgacaggtggataccaagtagggtttcagaaaactaaggctgctgggctaataaggtagttacttagaatggccaaaagcacagatccaagtttgagatgaaaagacctatctgtaggagggttctagagagatagaataactgtattagatccaaacaatgggagtccaaaggagagagagagacagagagcacagatcagaggtaagaagaccagtatgagaaagcagatggaggttgtaccagcttgatattgaggggtgagggtttactgggaaggggcttgaaagaacattgtagggtaatgtaaatattctgtgtcctgggccaggtgcagtgagtggttcatgcctgtaatcccagcactttgggaggccgagctgagcagatcatttgagatcaggagtttgagaccagcctgggcaacatggggaaatgccatctctacaaaaaatacaaaagttaatcaagtgtggtggcacttgcttgtagtcccagctacttgggaggctgaggtgggagattgcttgaacctgggaggctgtgagccaaaattacgccactgcattccagcttgggagacagagtgacaccctatctcaaaaaaaaaaaaaaaattggctggaaatcatcattctgaacaaagtattgcaaggacagaaaaccaaacaccgcatattctcactcataggtgggaattgaacaatgagaacacctggacacaggttggggaacatcacatacctgggcctgtcatggcgtggggggagaggggagggatagcattaggagatatacctaatgtaaatgacgagttaatgggtgcagcacaccaacatggcacatgcatacatatgtaacaaacttgcacgttgtgcacatgtaccgtagaacttaaagtataataaaaaaaaatttttcttttaaattctgcatcttgattgtggttatgcaggtacattcacttgtcaaaagtcatcatattggatgacttttatagtatgtcaattattcatcagcacacttgatcaatgtttttaattagggaagaagaaataggcgaataagtttttaaagggttataagtgcccagagcccactatatggaccatagacaagaactgaaggcaaaggggaactccagaaggttgttctgttcctccctctctcaaaatatcaaaaaatcatatctcagagctggatcacttttctgaagtatattccacagaatactaatttcatgagttgctccttgaatcaaaagaatctgaagtcaaataaattttggaaatgctcatactttatccaccttttggatgatcccaacatatattagaccagcactgtctaggaaaattataacccaagttccattagtaatttaacatttttgagaagccatatttttaaatcaatttaggtttaataaaatatttattttatgcctacaaatacacacacatacacacacaaacacacagaaacagagagatttatcacaaggcattggctcatataattaattatgaagccagagaaggcccaagatctgtagttggcaagctggagggccaggaaagccaatagtatagttccgatctgagtccatgtctcaaggcagaagaccaacgttccaccctgaagatggtcagacacagaaagaaaattctttattgctcagccttttattctctccagaccttcaacagattggatgtggcccacccacattagggagtttaatctgctttctgtggtctactgatgcaaatggtaatctcatccagaaacacccagagatcatgtttaaccaaacatccatgtgcccagtcaagttaacaataaaataaaccacatttacatgcttttacactgaacggcacatctcaacatagatgagccacatatcaagtgctaaacagccacttggctgatggccaccatattgtaagtagagcattagaataataaaggctctgagaagacttacaataaagaaacctttttaatgttgtttaatccagtgtgttcaaactttatttgactgcaggacccttatttccagttattgatcaaccaattgattgattgattgatttttactgatttcatttattattatcttgttctacagtaacacactttagaaatatcaacctagttcaaagtccataaagtagaggtccaacaattagatataacctacagatgtgttttagttgcttttttgagtgatgttttaaaaattgtttttgagtagtttaagccagcttttaaaaattaggagatttcacatgtaaatctggatttgtaatttaaaagtggaaacacctgatcacactgagtctgtatttcctcatggcaacaataggctaaagttgagtgtctgctgctctctttatcatggggtggggagtggagtgggctcagaggcacacagctcagggcatccacactaatgctccaatgtacgtatgtgtacccacacctgggcaacgcatccgtgagagttatctacttgccctgttaacaattaagtgtgcatgccctgatcaatctcagtcatcccactttcagataaataaatttaagcctagagagtttaatttaggtcattcacctaaagtcatttcttgagttagtggcagaggaagaaccattccccatttctcctgatggttctatatgctgtcctgatacttctaccgatgttccttctccttctttaccttcagagaagcacagaatctgtgagcctgacttactaactcttcactctctcattatgctctttaagttgaagtgattctctctgcctgacactatttggttctgcactcatcactaatgagatgctaacttgaaacaaatcaagggatgagagaacctttgaggaggtcaatatatcccactgtggtaccagagacagtcccaaattccttagataatcattcagtcttcttgtttggacttaatcaaaacattgtgtccactgctgaggagcatcccgactgaacagaatcccaccacgaggccttcaggagatagtgcatctgggcagaatgccagagcagtcaggatttagctactcccagagggacatgcattcctcccatcacgattccaatctcctatggctgattcttatcttgaggccaaggccaagagcattttttttctttataacaacagttgattttcctagggagtttcagctagttttaataagagaaagtttatccaagaatgtggaagtgtgtgtgtgtgtgtgtgtgtgtgtgtgtgtgtgtgtgtgtgaaggtatgggtgctctaatacctgttttagtgtgaagtttagtaaccttgaacatgaaaggcttctttcttatctctgtgattgctgcttggtggagatttaggaagtgatctgcagaagagaatgaagaatcgagtcagaagttttacactcagagctaacctcattggcctagaaagacaaggagcataaagaaaagaaaattcatcccgagtggccctgtttctagtcacctaatggactcgtaagtctattgcgtgttaggagctaaacctagaggttaaagaaatgagatgccgtccctgagataacactgttttcaaatgcagactcttggatcctcccaaggaaagctcttatttcttcaatttcttgctatcgcccaaatcatgagcagagtggctcagcgacccggccaaggaagcaccatgaagagctatacaaggagtgtcctaagattggcctagggagatgcttccgtacttgccatccttcagttgtagttaacctcgtaagtacttccaaaggcagagctggtttgagaagagccatgtttcctttctctatgacatctagcagagttttgcacttagtagttatatttgtctggcttccccagaaatcagagcccagagtagaggcctatttcctgtggaaataggaagcacagcaccagggggcaggaatgaggaggaggggttaggcaggggcagaagaagagccaacaggaaggtgtgttcctgacttgccatcccgtggtatcaagtgagacttggaatcaagcactccttcttgtaggacagtcttacgagagtctgcataagcaactcattcttagagcagtcgaataggcaagaaatatttatcctgttatctcagttttgcagagaccacaagggcaagaagtataggcaataccatccctcattgtactgtgaggcgctaagccatctgcacaagcaatggccccaagttatcccatttgcttgcattcccccattacctacctcaaggttaataatgggaagcccagagattggataaagagaaagattagagaacatttctttacaaagaacagtgtttcttttctctcacccaaggcggaaagaaatggagtgttcctccctccccttcatctattttcatcaggagtataactcagacacttgactttttcccatggaatttggagacacagggactggtacctgtctcacgcctgaaaaaaatgaatggaacgggcttttggcaggaggaggagggcaggagagcaaagagaatggcctgaaatctcagaggttgaggtaacaatgcatccgtgttgctttgggtcatgtgaggaccttctgaaagagccccggccatgagttgttttgaaatggaccccacctaagaaagctgcaggaacaaggtgaccctagtgaagaagtgggtcagcagaagccagtagacaaaggcatcataaatagctgggtaactgagggatcacctcctcaaggaactgtggggtagcagagcttagcatggaggagactgcatgggagggagctataaaaaactcaaaaatatacacaagagaagatgtcaaaatgttcaccgtgacacagtcacagcataccaatgccaggtaaagcctcaccacccacatgagactgtgttctcctccaagctcatcgtcaccttcccagctagtgaatgaaggagtaggtagccagaggacatgagggagaagccaggctgtgtctccttccacgacttggggtagagctgcccaaggcaggctcaggcagagggagggaagaacttttaaactgaataagagcccagcgttttgacgttaggctggtctgggttgtattatcattattacccccaaagaaataaccagaaaagctttgggaactttctgggactttatccaaaggcagagaaaaaagtacatgaacaaaacaagttggaaaggggtggtggtgaggaaggtggaaattgttctctatgtgccccgcagagcaacggagcaggagcaatggagcagctccagtgatcagcagaaggactgcgttttgtgggggcgcatcggaaatgccgtgtaacttcttttgttaaatagatgtcaagacagaaactagatgccatataatcccatcagtgattcttttctacagaaactaatttactaaaacatcacaggaaagtccctggacatgtgaggtattcgttgagcaatctgtcttcttcccctcaacctctctgctgggtttccctcctccttaactggcaaatacactttgccaacagcaaagatgtcaaaagcaaatttctagggcaaaataataccaactcttgactgtgaaactaaaattcttagagaatacatgagaaccaatagcaccaagttggtcattttcttaaaaaaaaaaaaaaaaaaaagcactgtaaaaacgatggagaaaacaattaaaaaaatagagtgataagtcagctggagcttgaggaaaatcaagggaaaggaagaaaatagagatacccacaaaatttgggggtatacatatgaaggaaaggacggctgacaggctggctcccagctgttatttgaaagtggcagccctagggacaaaaaagaaaatggaaaacagtggatggtgtatttaaagataagattctaagtggagttaagactcttctgtgggcctgggaatggtgtgagaaggagctctagattttcctgggtccagagtgagaggcaggaggcagctgaatggttgccctgaccagccccaagaatttcctgataaaatgaagggaaacacatcaaagcaaaatactgggctatctgccagatgtgcgactgggcagctgcatctgtatgggagcatccacgccatatccccacgctgcaatcgggtgtgccactccccagagccaccgatgcatccctcctgtggcaagtggaaaaaaagaacacacaaggacaacaactgctgacggtagagagagacttaaaagaagcctccaaatgggacatccctccacctggactcatcacctggctgaggttgttgctttataatcagcaacagtaaggacgggaagcagaaaagaaattcagatgaacagctttgaacagactgctaggaatcactagattggaagctcagaatgaactgaattaagtgatttatagatagtaggtagtggatcagagcagagatcagaccaaaattatagcaacaaactctattctctgcaagctgcatctgacgaactcttgtagctgtgaaacgacccagcctctggagaatgcaaagctttctctttttctctggtggcggagagagggaagcaaagtgggatggaatggctaggtcctgacttccttcatatgattttcttattcctcttccctccttgatcacatcagtaaagagacagaagacagactaagctacttaaactacatttctttgtgatttcctttttttattccattggaataaaaatgtctccaccccattcccttcttttctattacgttcttaaaaagcttgcatcaatttgtttaaaggttatacatcaaccacccttaaattgctaccagtttaagaactccctggcagaacccagcttccacaaggagttatttcctttttctgaatatttaagcagaataaaaccatttacagataaaaatatgcaacggccaccttctttccttatgaaattgaggggctgtcagttctagctccctcttactgaaatgaatatttggactacaccagtatgaaaataaaacgtcttgacagtttctcgaggttaatggtgcagaaccacctgtatttaacattccgacttctactccattaacgcgcctaactcagttttctttatctgccaaggagaaatggaacaaaaatcaatatcctacccaaagcagtgatgaggttttattccccctcaaatctcaaaggaatgtcagacccctttatatcaagaatctccctaaacaaattgcgggttgccactgtgtgaaccaatgttgtatgaaatcaagagttgaaacgattgccacctcgttatttattttccatcctgcaacatatatttcatgttcgcgttagtgcattcagatgccaaggagataagtactttaacaatcctaagacagaagtctatggaggcacttgttaatagcttcaatacatttccttgtgttgtaaatttcagctttcatatctttccaagaagttcctcccactattttggcagtgaatgaacttgccaggaggcctgttctccatcctccctttcttcttacttcatctcccactcggacccaggcccagccttcctgaggcacaagctgcacactgggatccctccccagctgcaggcacactctgggagccttgcccactcatgcccaaggaaaagggtcacagcaaggctggtgctgctatgggaatgaggtggcggctcctccttggttacattgctccaggctgattctctgcctctcaaagtggaaagcatgtttgcctagacccttctcaacttccaatggccattcatacttcagctacttcttgaaccacagcttcttcttccctgagttgcactggctgattaactgacctattcctgccccagcgcttatctgactcttgatatttatagaacttccccctaccccagcctagggttgctcttggtcctaatcagttcttcctgccatttcacccttgccatttaaacaccagggtcatgtgccctgtgttttgagtgtgtactttatctgttagatcagtggtcagcaaacgtttcctgtaaaaggccagagagtaagtttttgttgttgttgttgttgagacagagtcttgctctgttgctcaggctggagtgcaatcgtgcaatcttggctcactgcaacctccgcctcccaggttcaagtgattctcctgcctcggcctcctgagtagctggaattacaggcacgcaccaccacacccagctaatttttgtatttttagtagagacggggtttcgccatgttggccaggctggtctcgaactcctgacctcaggtgatccacctgcctctgcctcccaaagtgcttagattacaggcatgacccactgcgcctggccaaaagtgagtatcttaaacatcatgggtcatgccatctctatcctaaccactcagacctgcctttggagtgtgaaagccaccctagcccgtaagtaaacaaatgagcctggctgtgttccaagaaaatctcatttatggacagctgaaatttgaacctcttctaaatttcacttcgtaaaacattattcttcttttgtttttcaaaaaatccatttaaagatggaaaagcaatttcataatgctgtatgaaaacaggaatggggcttcgtttgcttggtctctgtgttagggattttcaataagtttctttgcaagtggcagagtagatgtgcaaaaagtagttactttgtgagtaattttttaaaaaaaaaagataaagaaatgaacgatggaatgaaggactgaatggtaaaatgaaaggattaatgaagaaatgaaggcatgaagaacgaaatacctatgaaaattatttgctccaaggaactctgaaaatgtcttcaatcatttttccttttaattccagtctccatttccagctctagaataccctgtatccagtcttccttgccatgtcccattcactcattcaataaatgcttattgcacacccgctaaggtactgcgaggcctattgccaggcgctgagaatagaacaatggagaagacaggccccatcttcagggagctcaagccctagaaggggctttaataagtgagcaagaaatcatattaccatatgaaatgtctatgaaatggttcagggtactctggaatcacatgggatgttaccagagtccagatggaattaggcttaaaaagatttaggaatttgagatcagcctgggcaacatagtgaggacactgtctctataaaaaaaaatagaaaaaattagccagatgttgtagtgagtgcctgtagtcctagtgactcaggaggctgaggtaatgggatcccttgagcccgggaggtccaggctgcagtaagtcatgattgtaccactgcactacagcctgggtgacagagcaagactctgtctcaaaaaaaaaaaaaaaaaaggatttagggagatcaagggagatgggccaggtggacactgtgacttccaccaagacaggactcctttgctttttgatcagacaaaactcatgtaagtcagtaggtaaattctgggatcctcaacaggacagagcccaaatgacatgttacgcactgaattttgatgtctctccgccaccccaaataagctgaacggtggtgtttggaggggggcctttgggaggtgattacatcatgaaggtaaaaccctcatgaatgagattattgcccttatgaaaacacgagaggtcatttttctcttcaccatgtgaggatacaaggaataagttgctaccagcaaaccaggctgagtgcaaaccagacatcacatccgccttggttgtggacttcccagcgtccagaatagtgagaaatatatgtttgttgttgaggccattctatccatggtattgtgttttagtagcccaaattgactaagacaggttcccctaaggttcaaaagacttatcggaagttctcttaccagccctttaatcatcaatctgcatgtttgttgtttataaatcccaagaagaatttgagataaattttaatcttaaaacacatgtaaaatattttcttcaaacaaagaaaaatcatgctgcagttgccatgtgttttaacgaaagatacagaaaggttctcaaaaggggtgtttcttgcacggctcttagataaaagctagggaagcagcattaaatcttaacagagtggaagcgtttctaaaagggactaagataatacggaccagacacatggctttctgcagaccaatctcaatcctgggcctgagctcaaagaatgtagatgaatggatgtttaacatgaaccctcaacagactcttatgcacatcacatctccagccagcttctggcaagtgctgaattgtagcaaattcatgatgggtttccctgatgagttcctgaagtgtcagtggaccctgctttaatcactgaaaggcaaaggcagccttccggggaggtagacagagccatacatagtgcagtgggagaggcaggaaagcccgctactcaaaaacatctgcatgtgtccaggtgccacagagctgcaagccttccattagagcaaacctcatcacatcactgcccctgctcagctttctccagggattccctatcaatttccaaataaaatccacaccccttggagtgatataaagggatcttcagagaaaaaaaattaagttagatctctacctcatgctttaaaccaaaataatttccagatgggttgaagagttaaatgtaagaaataaaacctaaaagaacttgaaaaaagtacacatgagtaagcattctctgatctagggatcgcaaagatttactaaacatacaagcaaaaaaaggaaaaggtggatagattggaccatataaaaattaggaaggtctatatatcacaaaaatgaaaccaatgaaatcaaaaggtgggcagcaaataggagaaaatattttaccacatgatgaagggctaatgtctttaaaattaaagcagctcttcacaaagaaatgagagaaaaaaaatacaatagaaaataaagggatataagacatgaacaacagaagaaataggaatttattgatttgttcaacaaatatttatgcttactctatgccacaaggtgttataggtactgtgtggcacacagtgtcctgctgctgggcgtggtggctgtctggggcaatgtctgagtccctgtctagacatttcctccagcaaaaacagctgattgatatggtttggatctttgtccctgcccaattttcatgtcaaattgtaattcccagcgttggaggtggggcctagtgggaggcgattggatcatgggggtggtccaggagatggtttagcaccatcttctggcactgttttcatgataatgagtgagttctcacaagacctggctgttaaagtgtgcagtacctaccccctctctctcttcctcctgttccgggcatgaaaatgtgcctgcttctccttagccttccatcatgattgtaagtttcctgatgcctccccagaaacagaagctgctatgcttcctgcacagcctgcagaatcgtgagccaattaaaccatttttctttataaattacccagtcccaagtatttctttatagcgatgtgaaaacagactaacacactgcctctcccaaggtatgtccctcctttgggagagcctgtacccaatggctggcccaaggaggagctacaaagggtgggtctcattgccttgagtcaagataactctgaaggccaccctagctcccagtccagcctctcccctgtcctgtctggttggctcactctttcaggtgatatcctgagattgccgcccaacaggcatacggtagccaatctatctcaggtctctttccagggaacctgatgtaaggtaagtgttcagcttacccagtcatcaaagagacacaaagggaagcaatgaaatgcccttttgcctatccagttaaaaagatctacttttaaatgaaaatacctgatatctcttaaggaagaggtgctcttctatcagcctgatgggatgcaaattcatatcacttttctgaaggacagtttagcaccatgtgtcaagctcatatgaaaacacagaggttactctgatgtttcaaattctaaagacttctctcccagaaacatctgtcaataaggtgactttcactttagacaagctgagttcaaggggaacatatctagtaagatcaaagactccaacaaaagaataattagttaataaattatggcacctacctagtatcagccattcaaaactatttacaacatactcatgacatggaaacatattcacaagactttttaaaatttattttttatgaagttgggggtcttgctatgttgcccaggctggtcatgaactcctgggctcaagcaatcctcccacctcagcctcccaaaatgctgggagtacagttgtgagccactgtgcccagcatcacaaggctttaagcttaacagatgtttaagaaaattgcaggtgtagtatgagctcagtttttataacttacacgtaggaagaccttaaactttagtttaaaatggagtaacaagctggggcctataaaaaagaaattgagtttatgggtgtattatacttggctgaagcagaatttgcaatttaaataatttgcatggggtttttggtgggtcaaggggagggcagatatacactgtgtttgcattgcaccgcagtccccactactctctattacctgttatcttttttcctttcctaattattgaaggcattgagtttctgattctgatttaaaactgcaagcaaaagaaggaaagtgattcacaggaaaatggctcttgtattgtcagcaaaaaggcgcttgttttgtcagcaaaacactttaccgaactgctttggttgtggaaagataccctgtaaaggcaggttgatttggtaattttggcatgcagatagatgttgctttcacttactgcagtaggaacagcagaggggaaattgatttctggaggggagacggtgacttcaaaggaacacatgtccagcctggggtgcttgggagatagtcagctaaagataccctatgagaagcagtatctgcaggcctgaatttctgtgtggagatggttactgacaccgtcagtaagagtgaaaacatcaacacgtgcataatgttagcagaggacatagaaccaagccctgagaaaatgatgggtttttttgtttgtttgtttgtttgttttgagacggagtctcgctctctcacccaggctggaatgcagtggtgcgatctcggctcactgcaagctccgcctcccgggttcctgccattctcctgcctcagcctcccaagtagctgggactacaggcgcccgccacccctcccggctaattttttttgtatttttagtagagacggggtttcaccgtggtctcgatctcctgacctcgtgacccaccctcctcggtcccccaaagtgctgggattacaggcgtgagccaccgcacccggtgaaatgatgttttaattctcatgttccttgaccaggatcagcttgcaaaactatggaccactccctccttctcaaagaactcctttcctgaggtttcatagacacgaccttctgatttctctgtctcttttttttttttttttttttttgagacaggatctcactctgtcacccagcctggagtgcagtggtaccatcatggctcactgtagcctcaacctccctctgctcaagccatcctacctcagcctcccaaatagcagggactacaggtatatgctaccaagtccaactaaatttactttttatacagtcagggtttcatcatgttgcccaggctggtcttgacctcctgggctcaattgatcctcctgcctgggactcccaaagtgctgggattacaggagtgagccactgcacctggcctgagttatcgtttggaggcagggtaaagcccagcctgagttatcttccggggcagagtaaagaagggtccataacggacaggacaaccagggaagtgtcagagaggctaataaaaaacatgtttcaaaatggaagtaataaatcagctgtaacaaatgattcagaaaatgaaagagaatttaggattttcgaaagcatttcttgatgttagcaataagaagggatttttgcaacgttgggaagaggagctttgggggagtgaaaaatgtcagagatgtggggagagcgtgggaggtgaggaagaggtgaggaagaggtgatagcaggtaatgatagctccttcaagatgaaattgtgaatagcagtatataaattttgcagaaccttgatactcatgtatactcattaatgtttatgagtgtgtcggggtgtgtgtgtgggggggggggtttgtgcgtgcattttctatataatggccaagagcaggggttggcaaacgttttctgtttagggcagacagtaaatattttagactttgtgggccacgtggactgtgccccaactatttatctctgacattgtagcatttttacagtacatcattttcttctctcttatgactttcttcagatcagtggttctcaaaactttagcttgcatcaaaatcacttgaatacctttgttaaaaatagactgctgagcccctccctgggagtttttgattcaatagatctagggtgggggcccaagaatttgcatttctaacaagttcccaagagatgctgctggtccagggaccatacttggacaatcactgctcttggtttcagcaatgaatgttagatctcccaataagactgaagtcatccatggaacaggccatgttttctatttcttttgaggttaaccccactctctcaggtaactttacacagttcaacacgtatgaaacatactctgctgccttcccaatgtgtaacagcctgccagcagaggtaaagctaatatgtaagtattgacactattgttctccatatatataagaaggtctcagaagtcaaagcaggagaggatcatctaaatacttcaattcagtggtgtgctgatcaatgtttaacagccagttggaaggtagggagcagggaggtgctgatttgtaacatttgccaatttctgttgtgtaaatgctcctcccctggccaagttcaagctaccaaggcaatgcctctaaaggcagtgttagaaaaatatgtacaccgtggactcgtgggagccaggataagcggggtccagcccagcaccttatcacctccgtcagcatccccaggaagaaaggcgtgggcagagaaatcactgctgctgaatgctcagtggctctacccagctcagcccctggcctgtctggttttcacggggggttctgaaactctgaaatatggaatgttaagactcctcttccagtggcttcagtgaaaaacagtttaaatggcacagccacacagagcccatcctaggaggcttgtctctaccaaccccctccatttgcttcccttttccagtgttccaagaggaaagaaggccgagtataggcagcagtggactcaggtcttgtttcagataggatggcaggagctgattcagttcttaggacctctgaggaagaacaaccacaacctgctcttgtggcttttcttctactggttctagccatctgggcttcagaaatgtaaaaggtacagagcagagctctcaactccagctgctcattaaaatcatctgagtagtgttgctaattcttttaatataaaagcaccaacacccaccccatatcttctgatttatctcatctggagtaaggcttgagtatttttaatacatgttattaacattcagctagggttaagtagcctgagctggggcagagtcattgacctattgtccaaaaggatggagatcccaaatagtccaaccctcatttaaaagatgagaaaactggccaggcacggtgtctcaggcctataaccccagcactttgggaggccaaggcaggagggttgcttgagcccaagagttcaagaccagcctgggcaacatagtgagactctgcctctaccagaaaaaaaaaaaataggaagaaaataacttagctgggcatggtggcatgctcctacagtcccagctcctcaggaggctgaggtgggagggctgcttgagcccaggagattgaagctgcagtaagctataatcgtgccactgcactccagcctgggtgacagagcgagatcctatctaaaaaaaaaaaaaaaaaaaagaaaagaaaaaaaaaagaaaatacctcatattccttttctgaactttctcctctgttccctgtataaaacagaacaaaaagaaaaggaagatgagaaaactggaacgcagaaaaacttacggatttgtctgtgatcgcagggctagttaattgcaccagtaagcttagaatctgttctctgtgacttgtagtcaagcgctttttctgatgcaccatactgattcttgtggtctgagaagcaatgacattaaacacatttgacctttttgaactttcctctgacaagggcttgggcactcaggtactcagcccaggtccctttatttccataaggaagttcctaatgtttatattagaagaagacaaaacaaggcttgatattgcttcctgcccgcatcagtagtaagttgtctttgaaacatctttctcctccagtctcagagaaaatgtttttttgacttggcatgctcacagattaaaaaaaaaaaaaaggatgattaaatttgcttttaagttaccaaatgcaccatgcaggtctgtaattgaccatgagagtgtcggggaaaatatgatctatcccctataaatcaggaaaccttaaacaggctctctaatcgtaaatgccgatcctggcagtgtccaaaaaggctcatgtttataaattgttccctgatgttttaagtaagtgcacaaacacaaatcatactaaggacttcagaaaagacttagctgtgtggcaatttattataagcagtgtaattttcatcagtcaggcagccatggactgtaattacctctctaccgaaagagttacaattgctttcattacattttcctagtcatgtgcttctctggattgccacagagacactggatggaaaatgcatttatttattgttagtcctcctaatggctcattacttggtttctaaagacgttatcaagtcacttgctttccctactcttccccacccccgccagtgacatttatagaagacaaaagagacacaacttgaaaaccgacagcacatgtcaagcacccgaaaactgcccagcatctacagacaaccaactctggtttgaggagtccctgttaggctggctaaagttcaaatgctgaagattaattaaaaccacactccactgaacacaactaccagcctcccagtcacaactgaaaaagaaaccgcattttgttccctatagttagagctttacaggaacatttagaggactgggaaagcagtctccaatcctgtctcccacatgggcgggtgcatttaattagagggccatgtcgcaccttggacttcaaacaggcaaaggcaggggatgtgttcacccttctcctatccccactacctcccaataccataaagagaaaactggagacagagatggtgagttgggagggtgggaatgaattggttgaggagtagaccctgtctacacagtggcggatgagttttatcaagccaaatcattctgtcagtcattgaggaggggtttgcttcttgcttagaggaagagacaactgtgggtcacattccatagaaatcttcccacgtgtgtgctcatctcttccctgctgtgtactcataactctgccactcagcagctatgactctgagcaagacacttaaccttggcgaacctctgctccctgaagagctactgaggggtcaacagtgggaattccaaactgtcactatttccactgtcagatcaaacttggggcacatgagaaagggaaggggctatgtgcaaactccaggagaattcctttctgtgtggtttttcttctcgtttttaccttttatttatttttatttatgtttatgttttaattttactttaagttccaggatacgtgtgcagaatgtgcaggtttgtgacataggtatacatgtgccatggtggtttgctgtacctgtttttaccttttaaattggaatccatgtcactacacacagaagtaggagccctacctaggaactcctctgtagtagtgttgagaaaagagatggtgtactatatagtctagaaacacagaatgctaaaattttaaatctcagaaggatgggagcaatattgtccgttccagtgttcttttttgttattttgtttgtttgtttgagacagattcttgctctgtcaccaggctggagtgcagtggcacgatctcagctcactgcaacctccacctcctgggttcaagcgattctcctgtctcagcctccagagtagctgggattacaggagcccgccaccaggcccagctaagtttcatatttttagtagagatggactttcaccatgttggccaggatggtcttgatctcttgaccttgtgatccacccacctcggcctcccaaagtgctgggattacaggcgtaagccaccatacctggctgtgttcttattttataattaagaaaactaagccccagagaagctcagtaatgtgtcagagtcacagagctgcttaatcaccagtacaacaactaccagtctagactttaccctaccaaattatcccttcctgacacacctgggtgagtgacagggctgtggtaaggaatacaattctcctgactttgttcctgcacaccacagagtacccatcttcttgagcgtgcattgaaagtagcttaaaacaggggatccagtaaatgttggctaaatccggatgctctgttttccttctagagccctcccttagaattactcataggtctgaacccgggaataaaatcatactcttcccattaagatggagccctgaggatgcctgccatgtagcatgagccatggccaggcatgcatgtcctctttgtggtcagccactgggaagcctaggagtggacgtatccccccttgaactacttcccatgagagtgggggacagtcacaatttcattccaccttaaggagtccccattggctgtgccacaaatagttaaaactaatccaaaggccaggtggggtggctcactcctgtaatcctagcactttgggaggccgaggtgggtggattgcctgagctcaggagttcaagaccagcctgggcaacacggtgaaaccctgtctctactaaaacacaaaaaaattatccaggcatggtggcatgcgcctgtaatcccagctactctggaggctgaggcaggagaattgcttgaacccgggaggcagaggctgcagtgagctgagatcacgccactgcactacagcctgggtgacagagcgagactctgtctcaaaaaaaaaaaaaaaaaaaaaaacaaactgatccaaaatgctccccagtgacagggctaggcataaactcatactttataaggctggttcattcagggtaaaaatttctgctttttatttgtcaaatggaagagctcttgctgttggatgagtctctcacttctgcagaaatcctataccctccatttcctcccatttgcttgcatttcacaaatggccacatcattttgtcaaattgtggagccacttggaaattgggcgtagagttttgcataatcattcatgtcatgcctgtgacactctgtgattatacataatggtctctgaggagtcctgctgcaggggaatgctacctggtctgcctcagagccaggtctcattacaagcattttatagagcaggacactgagggaaaatagctatgtctatagcccctgtgtagacaagcaggaaaagcaggaagctcagcattaagcagtgggttaatgtcaggaaaatgaaattgtagacttgtctgaaattaaccttcttaaaaattatttcagttcaattgacttctgtgcctagacacaaaggccaaatttcactaaaatttcacaacaaagaaacaaaagttagttcttgctgcaggacagtttctcttctctgaaggaaaagacttaagcatttgttaagaatggaaagacgtcatcaacagtagatcttgggtgatggggacataggatttcattactatcctcttcacttctctgtataattgatactttttatattaaaacgttttcttataaaacatgtaatgtatctctttggttgtttgttggaatgtttgaccctatattgaatttcagactgtgtagaaaaataaatgcaccccagcaaatcccagcgaagccaaatctccataaagatggggcaatgaaagagcaaaggtattttgtgcctccttttctgggaagggccccatggaggcagcaaatcaccagagaagagaaggcagcgtggtatgtcaaggtacatgagttgtatacagtcttgtagactttcccagaacctgccttagttacagagatgcaaaatgcgtcacacacacccaggagtggcatagacactgtagaaatggctattgcaccagaaagggcctcacaagagaaacaggaaacaatctcaggccgggagtggtggctcacgcctgtaatgccaacattttgggaggccaaggcaggcgaatcataaggtcaggagttcgagaccagccttgccaacatggtgaaaccccgtctctactaaaaatacaaaaaattagctgggcgtagtggcgggcacctgtaattccagctactcaggaggctaaggcaagagaatcacttgaacccgggaggcggaggttgcagtgagccaagatcgtgccactgcgctccagctcaggtgacagagcaagactccatctcaaaaaaaaaaaagaaagaaagaaacaatctcagcaaatgctgtgtagcaagatgacatcaagggcatgatgtccctagaacatcaatggaaccccaagaaacaggaagaaaatttccagaaatgacaagcattatctttccaatagccaggtagtagatattgaaataaatcaggttatagaaaaacaaaattgcatttattgcacacttgattgtgtaaactaagtttcgccccttccacacgtgccttcccagagagtcaccatctctccccctctgaatgctactcaattctcaagtttctgtctaaaaaccacttctaccatggatccttcttttaggactctaacccgtactgacatcgtttggatattctcccctcaaaatttcatgttgaggtcggtacagaggctcatgtgtatgatccagcactttgggaggctaaggcaggtggatcacttgagccaaagtcaagaccaatctgagcaacatggcaaaacctcatctttacaaaacatacaaaaagttagtcaggcatgggggtgcacacctgtagtcccagttaccccagaggctgaagtgggaggatcacctgagcccaagaggtcaaggctgcaatgagctgtgatcaggccactgtacttcagcctgggtgacacagtgtgactctgtctcaaaagaaaaaacaaatctcatgttgaaatttgatccccaatgttgcaggtggggcccggtgggaagggtttgggttatgggagtggatccttcatggcttgattctgtccttgggatagtgagtgagttcttgtgagatgtgattgagtaaaagtgagtaacacctcccctcccccacctttctcgtgctcccactctgaccatatgagacacctgctcctctttcaccttcccctagggttgtaagcttcctgaggcctccccagaagccaagcagatgccagcatcatgcttcctgtacagctgcagaactgtgacccaactaaactttttttctttataaattagccagcctccgatatttctttatagtaatgtaagaactgcctaacacacctacttaatccttaattctctcccctcttaatttctataatacctcctctgtcccctctggtttcagagcttgtgtgtctccctgctcactcttgtctcaggtgctagacttacttctccatagattgtaaattctacagaactgggattgcattgtatattttgaagactgctctaactcagtttaacacccatctttgcttacaatcttctctagtgattacaatctgtatcatcatcatgtctaatatttataatatctatattacggttaccatattgggatattattggcattgtgcctatttgatatttaattataacagtatacataatatctctatgttagtgaaaccacagagcagtagcaatctctacaagatgccatgggaagtggcagacactttcatttgtgtgtttctacacctggtctcggttccttccatctttgttcatctctgctctagaagggaaagaaatgctatactcactgttccagccccctctgcagctagtagctgccaggagataccagcttgatcaatgagatggaatacaaagtttgctggggacttctgggaaagcttttactcttcccaatattgggagccaatgtgcctgcaaacctcttctttttccttcttcctgcctgtcttgtggattctggatatgatacctacatttggggtagcgaccttgtgatcatgaagaagagggaaaagaaatggcagagtttctggtttgacttcactgagcagctgaaccaatgctggcagtcatgtacctccagacttcttgctgtatgagaaaacacaccctattttcctaaatcattgttgatgggaatttcttttgcagcaaaaagcattttgatatagaagacatcatatatttaagaacatcctaaaggcaaatagaagagtttcaggaaagacggtgacatggcaaagagaatccaacctaacctctggaaagtgatcaaaaaggatggaggaatagcaaaataggaggaatattttatcaatgccagacttcagaaagcttgctgttatctgcttcatacttcatagaatttatactcaacgtagaatagaagagaatagaataaatgaggtgactgtaggcaatgcacaacttcgccttctgagaaatggtgtgatcatctacaactgagtaatgacaatcccaacagaaccactctattagaacattccataacttagagacgcaagagtgggccatgaaggaaatggaggctactctagttgaaacaatataaaacaaaataactagcaagaaagtatatgaaacagaaagcacatagggtgacagagataagaccagacaatttagttgtgaatttaagtgaaaataaaagctccattatttgaagaataatcactctttaatcaagaaatattttatatctataatttgttatattactccttacctaaaaaatatcctatatggtgactatggtagtagtgccacaaactgaatttgtcaaaatttgcaggatcatatacctcaaagggtgattttcttactgtttgtaaatagtgcctcagaaagaaaaaaaaaacataatttatgcttaaagaaatccagaatggttgataataaaagtatagaaaaaggtatatgaagaatagaaacaaaaagaaagtagagaatgtaataatttcaggaaaagtataattcaagtaaaaaacattaaatgtactttgggaggccaaggcaggcagatcacttgaggtcaggagctggacaccagcctggccaacatggcgaaactccgtctctactaaaaatacaaaaattagccaggcgtggtggtgtatgtctgtaatctcagctactagggaggctgaggcaggagaattgcttgaacccgggaggcggaggttgcagtgagccgagatcacaccaccgcactccagcctgggcaacagggcaacactctgactcaaaacaacaacaacaacaacaacaaaaaaaaaaaaaaaacagaaaagaaaagatattaaatgtagaagagtcatattttgttgataaagaatgcaacctacagtaaagacacggatataaatctttatgtaccataacatagcattgaaacatagcattaaacagaaagtgacaatgacaatcatcttgagaaaatttaacatacttctataagttaatgacacagattaagtaggccaaaaacaagattatagagtagtttaataatatgatcaataaggttgaattaaccgtttgtcaaatgctgaaaattagtagctaaacttttattaaggatgtacgaatattgatcatgtattagagccatccttcaataaataaagtctcagatttttcaaatgtaaacatgagacaggctctgttttctgtttacaatagcataaaacccaatgtttttaataaaaatattttaacatcacctgaaaatgtgaggggggaactctttattaaaccccttgggtcaaagggcaaaatcaaagatatgatgacaaaatattagaaaataaatctaatacgaacactgcatattaagcttttctggggtttctggcactgctcagagaaaaatttctaatccttacatgctttccttattttcttataaataattccttatttacattctttccttgtaaaactatgaaatgaaaataaactatgtagttacttaagggaattaggaaaaaggagtaatggcacaaatcaggaaagcaagaagaaaataataaaccccaaaataataaaagcagacactattgagttagagaacagagagtgagagagagaaaagttgataattaaattcagatgatggttctcagaaatatcaatacaatgtagaggaggacaaaagttttctgtaaagggccaactagtaaatattataggatctctgtcatgtattattgtttgtgtcatatattaatgtctgtcacattatattatttggttgtttacaactcaaaaaaacatgtaaaaaccattcttagccattcttagctcctagaccatacaaaaacaggccgtaacccagatttggccaactggctttagtttgccagctcctagtgcttctcaaccctagctaaacattaaaacattagagtactttaaaaagaaatacttgtgcctgggcccaccctagaccagttaaatttaaagctctgtgttgaaactgagcagtggtgatattgaaaaacaccccagccattcccaatgttcagtcatagttgggaatcattgcagcagaccagaggtcctcaacgtgtgctcctaggactagctcagcatcacctgggaactggttggaaatgaaaattcttgagtcccaccccagacccattgaattagaactccggaggtgaggcccaacaatcagtgttaacaggttatactggtgattcttaatggcactcaagattgagaacccttgtaagagaaaaacctgtgactgaagataagagaagcagtttccaagaggacataatcataagtattatctttcactgtttgtaaaactactatgaaaagatagaatcacaatccccagaatgcctggaaatgcatttttaacagatgactcttgttgattgtgataaccaaagaagttcaagacacgttgataacaagaaatgaacacacacacacacacacaaatattaaaaataaaaatgatataaaaccatagactcagatttgatttcttaattattagagaaatctgtatagaagacaatataacaaatttgaagacctcaaagaccttcccctccgcaacccccaaacagcccagagtatgttatgagcaatttctttcataccatcaaggaacagataattcccataaagagaactggcatctaaatctaaagctggagatcaagctgttggcaccaaattgtcaagattagaatctattcaatatgaaggttaaccagataactcagggctcaagcccagacaggacccaagacatcaacaatacaaaagatgttgtcaaccagctaggtgtcagaggaagatagcattttatgagaagattggccattagctttgaaatgaactcagcattacaactgcttctaggagctggttcaaagctggaagatttgttttgtctgccaagaagaggtttctgttcatctgagattttagagaagtacaagagaagaaacaaaaaatcaggaatgtggtgagactaagaaggaactctggtcttgatctctatacagtaagagacttgtcatcagcttaagggttgggtgtggcacttaaatcaaaggggaaatctgaaaaaattaccatgggaaaatgacttggggaaattcatgaatgacgagcagtaggactgccaaggagagtagatgaaaccaggccaggtgcacctggatatgggactctctttattccttctctgccacatggaaaaatatgacaagtccagggctgatatcagacagggccattttagaggaaaaaggggaagtttataccagagggcaagaggcctgaatgaagctgggcatagtggctcacacctgtaatcccagcactttgggaggctgaagcaggtggatcatgaggtcaggagttcgagaccagcctggccaacaaggtgaaaccttgtctctactaaaaatacaaaaattatccagtcatggtagtgcgcacctgtaatcccagctacttgggaggctgaggcggaagaatcacttgaacctgggaggcagaggtcacactgagccaagatcacaccattgcactccagcctgggcaatagagtgagaatccatctcaaaaaaaaaaaaaaaaaaaagagagacctgaatgaagtagctgattgtgcggtttagcatgaaaagaaccatgaggttttctctgcatctgatcatctgagtgaagtcatggactcatcaactgaaagccaatgattaaagagctgattaaaggtgcatgaaattaagtgaatgagagtcaactccacacctatttattgatcacttgctgagtgctgacattttgccagagagtgatggcgtgtgctccttgatcttgggaagtataacatcttcttgaggcatgtccagtgaagacaaggaagcaaacaatgaactaatccaccagggaaaataaaataaagatgaaaaacagggatcccagcaaatgtattcttcaagagcagaggaaagaggaactaagcatcagggagaagaattttggaagagaaaccttccaacatgaggaaatagcctgagtaacctgtctgagagtacaggccttgggcaggaaacaccaagctcactgcaggtagttcactgctggtttgcacccaggtgttgggagaagggggtaacaggaaggcttgtttgttccacccagtgcctttttcttaaaaacttaaatgtgaatgcctttaaaatagggtcttactttctctaatttttcattggccccactgatctctataatattaaagttcatcggctacccttgtgcatgtcatttgtttgaccattgaagtcatctgagtgtgtggcctctaaagcaggccactggttctgagtttagagtccatggaggtttgaggtcagagtgacccaaattctatgccaaaagaacaaaacaaaaacaaacaaagctcatgttttatttagtgtgaggagtggccacatggggtgtgcagttagttgggctgcactttatgaagacaagtcatagtgatctaaaaaagtaaggaggtctacaggcagggaaacaccacaaagccattgtttccactgaggcaaggcatagggagggccagaaatggggaataagccgagaatgaaaatacaggaaggaacatggaatcccttgcagttgtagaattagcaactgtgggtaactacttgcaaggagagaaataagaactgaagtggagatcacttggaggtttcatctgaagccttataaatggtgtcatcatgaactaaaatggaatgtagcacatttaggcaggattgtctggtaaggaagcatcacatgtatgtcctagagtctaccagcatgttcgtcagttaatcatcctatgtaacaccgattttgtcttcatattccccactcccccagtcttccttatttctgctgaggatgctgttctttccatcctctagaattataattccagaatcctgttaacactttctttttgttctctttttacaacgtcagttaccaaattttcttgaattcctttttttgtattttgtattatgcatttctttattttattttattttatttttattttattttattttatcttatcttattttattttattttattttattttattttattgagacagagtcttgctctgtcacccaggctggagtgcagtgtcatgatcctggctcactgcaacctctacctactgggttcaagcaattctcgtgcctcagcctcctgagtagctaggactacaggtgtgcaccaccacgcctggctaatgtttttatttttagtagagacggggtttcaccatgttggtcaggaaggtctcgatctcctgacctcgtgatctgccaacctcagcctcccaaagtgctaggattataagagtgagccaccgcgcctggcctgtgcatttctttttaatcattctgtctactacctgatgattctagatcctcaatatgtcatcctcagtttaccacaatagccacccagctagtttccctgcaaccagtcccttgctcccttcaatatttcctccagattcatcttccaaactctcatatttatctcattattactccctctaatcaatgtttcatgccaacagagcaactccacatcacccaaggaaattttctaaactccctctaggttctctccaatccagctctacgtttccagttttatcttttactactacttccacttgaatcagattaatttcctaaatttgttttgctcagtctgtaaatttgcttatgtgtctcctctctgtgcaaagtccttttttttccgtttcaatccaaactttcagacccagctaaatctctgtcttattgaaaaggctgcccttcagtaaaattatctgttccatcttgaatctcagctttttgaccctaccatttaaataggcatttatagattccctgcagtatttatttatttatttatttatttatttatttatttgagacagggtcccattgtcacctagtctggagtgcggtggctcaatcatggtgtacggcaacctccacctctcaagtgatattcctggctcagcctcctgagtagctgggaccacaggcacataccaccacacctggctaatttttgtattttttgtaaagatgggattttgccatgttgcctgggctgacctggaattcctgggctccacccacctcggcctcccaaagtgctgagattacaggcatgagccaccttgcccaggctcgtacttcttatattgttgcctttgtttgatattaattcatattaatcttatttccccaattcgattatttgttcactgagattttacgttacattccttaaaatttctcaaagaactcaaagtgattaaaaaatcaatgttggacactcaatgtatatttatagaatgaatgaatgatattatgtttataacactcttagaggtgccattcattcttgccagaatggggatcaggcaaaacaagtagagacttacaagggtaggttgcatgatgagttattaatatggatgtggccttgtccacgtagggtggttttatgattcaagataggacagtttatactgtggtaacacacaattccaaaatcccagtggctcgtcttaacaaaggctattttatcattcactttatatgcccaatctgtataaagggaggaggagcagagagttttgctcatgagaattcctcagggattgaggctgatggaggctcttattacatttatccatagccaccatgccaggagcaagagaatgaggtctaccttgcactggctcttaaaactcctgcctgaaagtgacacttccactcagttttcatgagccacaccaatcttgaaagatggcaggaagttaccttttgaccacatgtccaggtggagtgaaggaccagattacttatgactaccacaggtgctagtgttggctaagaaaagtatgccaaccatgttctttagtttcagccaacaaactcaactctggttaatgttaacaaaaaaggaattaattgggagggtacagagtagcttacagaattaaaggaaatctaccttgaagagaacaagaccaaagtcaaccctgggcatacagataaagaaccatagtgacaggctctttagaccacttccaattgtgtgaatcagccacaaccatgtattctgtctttgtattatttgtttagctttcaaattcttaggtgagagcatctaattggctgagctcagatgatatgctaaccttccccagggatggaagggcacctggaactacagctccactaagactgtctgcaactgaaggaagatcgtaacacaaaggaaaaacaggacactgttagaaaaagaaggaataatggaagacagaaaaaatgctactcatgtttagtgtgcatagataatttcatagtaatttaaaaggctaatggaatcacgacatgcctatgcagcaagaaattatacaaagactgaatttctttatgtcttatctagaggcctataaggttgtacctttcttttggttcatttcttccaaaaataagtctaactcccacttcctcctcaagtgcaaatcctgtcttatggcattagcagcagcgtgatatgattgtggggataattaatttctagaatgtaaagacaaaagcttcccttttagtgagcaaagccaaatgtctgctcatttaaatagcttacaacaaatctacaactgacttcctcctgtttttcccagtgggaactaatgctaaactgaaatgcctggatatgtggcactttgaatgacaaaagaataactaggggacagattagtcatccctaaaaactctttccaaatttccaaactataaagccatatgcagcagtttcagaactggtgactcaggactcatttgccagcaacaagaatgttctaggatgctgtagactaagccagagaaagactccccctaccatcaatacccccaaaacacttcattcaaacaacaacttaaatgaaagagtaaacaaatcagagatgctctatgtgaaaacaaatttggagatttctcctttagttcttttcttcctaaaagtgctttctctccttttctgcctgaaatttttgatacataacaccaatgtttcaaactattgacttaagacagtagccatttgtttagtttataattctggaagtcagaaatttgggctgggctcagctagccagttcttctgcagatctcaggggttattcctgcatctgcagtcagcccatcacctacttacagggtttggctctctgagatgacagggacacctgggcccctgtctctcatcattctgtagatgagcctgggattcttttcatgaggggtaggcaggggtttctaagaacatccaaagggcaagcctcaatgcacaaatgctttttaagcttttgctttccttgtgattgctaatgtcccactggccaaggcaagtcacatgcccaaaaaagatttagacagtagagaaacatcttcacccacctatgaggggagctgcaacggcacaatgcaaggctgtgaacagaagaatgggtagaatctgtggccactcttcaatctttacagaaggtaaaccctgacaggactccatgcaccagaatttagaaaccatgggctaagctaacctgatttatccatcctcagtctggagggaagacttctagcccacccaatatgtggggagccagtcgtgtctaaatctcttattttctgcaggcttctaggtgaataggttagcaaaagcgactctattgctcaactaaatagacatttatcttgcctccccagccttggccatctgccctaacactgcctgttcctttaacatgtagcattaacagagagagaccaccgtgccatccacagaccttggaaagacaggctgcatttcagtgtagtacattctgctgatggttgaagcagttcaaagtgggataatttaaagctcttatttaactgaaagaattcatttgtcttttgatccaccttccactctgacaaatgctcccttccctatcacattcaaacacacacccccttcagaagccagtaaattcatcccctgccaaggaatggattttccccatattgctctatctgagtgataaaagggtttaatgtcccaagttcatttttcagtagctaactcagagatacccgacacagcaaagcacctaagctctttctagagttattaaactgttatatccctaattcctttggagcctcgacctagcagcaatgattctgagggcacttcctattaaatctgcattttgcacagagagataaagcaggccagtgtgaccctgtttacagggatgacagaagagcccctgcaggctctggtgctgtcagcagttttactctatcaggaagcctatgtgagaaggtccctcacagctcttggcctggacacatttgccaactttgcacacttttctgaaatgcaaccactttcaggttgggagctctgagccacttggcagctctgtggggcagcttttttgctggcaggatgtgagcatgcaacaagcccaaccaacctgccaggcacgggagacattcccaggcacatatccatgaagccaaagagcagtctggaagaaaacaaacctgtgtggtttaatatataaaaggagtcttcaaattgtgtgtacatatcccaagggagatagaaggtaatgcactgatatacagggataatatgttagaattacttttatttttgtttttaaaaataggaaatgaaactcttccaattttcaatatacagctttacacaagcaccctcactctatccgtgtcaggtggcacacgtcacatgcaatacacacatccacaacataaagttggaggggcagattaaagaggtatcctccctcgtctagtaactttaagcagactgtgatgtatccctgtttatgtgggaacaataaaattaatttaatgactgcaaaatctattccaacctaaattaacccctaccaagtacaccaatggcttaaaaggcttcaagcaaagatgctaaagatggaagatcagacccttagtgtagacacaaagcaacaatagctaatctgtccattctcccattgccatttgatctctctgtcagccacattatgaaagggaaaaacagagaaaggaaaagaatgggactaattaaatttgaccaaaaaatgttcaaagcttcatattttttgctggttttttttgtagcaattcttattccaacactgaattatatttgcaatatgaatgtatacccaccattgttgatgacatacttcatcaaaagtaccttgaaatatgagctaatgatagtttgaagccttcaggattagaaagacactaaaatgtggcttatttcttatttatctcaaccttttgtcattcttactttgcacatttaacaatataaataaagatgtacacattgaaagtacatgatgagacacttttaaccaatgaggtgcataatcaaaaataaaaatgacagccaacatttgttgtctgtctgtaaattcatagcccctcaaactccaaaccctgtgcatttatcactcaccatgcagcccccaactaatagaaaataaaattaagtaagaaatgttattgaaattacttaatttgttagctatagcaggtatttgtttaaattcaagcttatcatcccaggttctctaaagactggtagaaaacttttcaagagcaagtctaacttaggatcgtgttctcctgatgataataataacaccacctccactgcaaccaacagttactgtgcttcctgagtgaaagtcttctgctaagagctttaaagatattaactcatttgctcctcacaataaccctataaggaaggggtcctcaagccctgagccacaaaccagtaccagtttgtggcctgtggggaaccaggcaacacagcaggaggggagcattacagcctgagctctgcctcctgtcatatcagtggtggcattagattctgataggagcgcaaatcttactgtgagctgcacatatgagggatctaggttgtacattccataagagaatccagtgcctgatgatctgaggtagaacagtttcatcccaaaaccatcccctccactgcctcccataaaaattgtcttctggccgggcgcagtggctcacgcctgtaatcccagcactttgggaggccgaggcaggcagatcacctaaggtcaggagtttgagacctgcctggccaacatggcaaaaccccgtttctactaaaaatacaaaaaattagccaggcatggtggtaggcacctatataatcccagctacttgggaggctgaggcagaagaatcacttgaacccaggaggcggaggttgcagtgagctgagatggtgccactgcactccagcctgggtgacaggagcaaaactccatcacacacacacacacacacacacacacacacacacacacacacacgcaaaattgtcttccatgaaacgggtccctggtgccaaaaaggttggggactgctgctataaggcattgtggtggacagacgttcaaggcggttcccatgatcccaactcctggtatccataccttcatattaataattgtacccccccccaagtgtgggcagaacctgtgatttgcttctaatcaatagaaacattaaaggtgacgtaattataggtgagtgattatgtgattacgttatataagattctcgtgtccaacttgctggagtgtctctctccctggctagttttgagtaagcaagtagccacgttggggacccacctggcaaaaaaccaagggtggctttcagccaatagtcaacaaagaaatgaagccctccagagatacattccgctaacaacctgagtgagcttgaaaggggatctttcgccagtcaaggctcagatgagaccccaatcccggcagacaccttgacttcagccttgcagaagacccagctgagccatgcctgactcctgacccacagaaactgtaagataatgaatatgcgttgttttaagtttctgtgtttgtagtaatattgttataaagcaatagataaccaatatagttatgtatatttttatgtctactttaaggatggaaagttaaataaattgaccagttcacacagctagtcagaggtagggctggaatagaaaatctgggtagcctgcttctggagggttagccttaaccactgcactttccggcctctgcagacaatttcccttctagctcactagtcactgctattgtctcactccttctccttaggattggacttgtatccccaggccctggcccctttagggtaccaaacccaatcccgtgcaatcccagtgccaaggctgtggcatggcatttgtgttagcacaaaggaaagagtggcgactaatgagtcacgggcgtttcttccacagtccaagcgtctgggaaggagcaaagcttcatagccaaccaaagcctccagctgtctgtgactctgaataagctctgccaataactcaagtttccccacaaataaaggagaaaaataaatctgtgggtgtcaccgagagagtcttggcatgaaagtcaggagacttaggctctaaccttgggtctgccagccaggaggccgtgggaacctggagaagtcacttggtttttctagccctttgctttctcgtctctgaaaagagggctttggattggatgacttttaacgtctccaaaaaatttacacagttctaaggtactgtcatggtttgaatatatttaatgcctttctcttcccctaactccagaattgaaacagccttcatttcagctgcctaattttgaaacccaggggacacatttctaatagagagtgagctaggaaaaataaagaagaagaagcctcatggggtcggagacacaaggaagggtaaaattaatagccgaaaagaagacgttctcacccaaagccattgaaaccctgagcctccagcctgggcattttctgcccgtggtccatgctcagctgccagcattcctctgtccctactttccctcgtagattgagtcccagccggcatgacagtctcatttctcactgaatgcttgcggtgaatgctaaactgtaatctctttttgcatgcttcggttccaaattcataactggaggagcagaccccgttgtctgcaagcgttcgctgttagccgctctgccgagcagagccaaacggtcctggtcctgcaatctagtggctttttccctgcttcacactttgtcaaaatgcatcacgggtgacacaaagaaatggccgctggaaactccccattttccaatccttttactatctaattgttcctcttcttcaaggcttggccatcctcaaaacagaccagggtccctgcctgggttgttttcattttaaagcagaatgcactacaaaagagaggcccttcccacagctctaagcttggcactgtctgtggtcattgtcttagactctgctttctacgccctgcgctgtccctgagatgccacccccaactcaccattactccaaatggccattcccttcctgcaactctaaaaacatgatccaacaaagcgatccagtgaaaagtagagcaggtttacccccaaagaacctcctacctcccattgcacatacaatggtgccatctccttgcaaagggctgcaattcctgcctgcctcacccacttcacccagcaagtcttgcaggattggggccctccagccacacgggccttcatgtccttttctcaggtaccccaaagggccttggcacatgctgtcccctttgctgcaaatgctctctatctctagatctctccatggctacctcctgctcacccttagtctcaggtctgaggaactgtggtgcacagcgacgttgtgcttggtaggatgagcactgctggttccagcacatccagtcagcaccagccattgcaatctcctgactctggacatcaacatctgtgactccacctgaggctttctctgaccactttcccacgcctctgctggtatttacatcatgacctcctctataaatggtttgcactcaaatctttgtctcagagcctggtttgggcaaccaactaagctagtctgcgctaccaattttctctccctggtgcctttttctattttttttttcatgcctctttttaaaaatctctgaatattttctcctgtttatgtattatcttattcttttttatttactgtcttcttctctgcctggagagtgtaagctccaggagaggagagagtgttgtatctatcccctgcatccaacctcagcctggcgcatagtaggtgctcgaggaatgttttctgaagaatgaatgagctcctcctcatttacagcatcctatgattttaagtcactgtttcgtctttcaatagtatttccaatttgaggctcaaggcatcctgcaaagcttccccatgcctctggcactcccccaaccccactaaaggaatctcaagcccctggaggggaggaagaaaggaaagttgtttccagtgcctctgatatcatactgcagtcacggaggcacccagagtctaccagccctgatcacccagtcttgcagctgagacctaaacagaaagggcacttagatgttatgataaggatacaattttggatcaatgtaactattggaactttggactcttgcgtaaaacgtaacatgttcatttcttaaaaaaaaaaaaaaaaaaaaaaagcatgtttgtctcagggaccatcttttgccctgcaggattttctctgtggttaactggatctggggtctcattcctcaatcaaagaatgaaggtgttgattaggtgactgccagcaggcatttgaaggaagccagtcttcctgcgcagccttctgtatgaatgcagggatctcaccatacatgtgcttgtatgtgcgtgtgcattgcccacaggtttggagtgcatgtgcagtgttgtgtgtcacccaccctcactccttgtcgacactcctatacttggtccatctgtctaatctccctggatccagggcaccagaaattatgtctgttcatcattgcgcctgcaatgtttgtcatagttaatggtacacattggacaccataaatacacaatgggggaaaaatacatgtatgcatgaatttcacttcttcctggggaagagccactaaaactccttagaagggtcctgaaactcattaggactgagcagaatcttcaggagccctctataaagaaacagtgacaatgaatagccaactaagaaaaaattatagtgtcaaaggccaaaggaccaatggcatttaaagagaaacatgggatggctcctaggtgacttctgcacaggcacccatggcttagctataaacagatggactaatctcaagaaaactccaaaatcagtacattattgccagagctgtgttctccgccaaagacgtccaaaccactttgtgatcatgagaggcacacctagcctcctctcatggcatgccaagccaccaagggggccagtcctaggagacagctcagaagaggcactccgccaaggagactggaggctacagaaactgccccaagaattgagtgagatgatgtatgtggaggcattttgtaacccataaatctttttacccccactgtgtgttttgatgatgatgataactattattgctaagtgtgatcagtggataattagtcccagatgatgccccattggggaaaaaaaattgttgtggtcagaaagccagagtgaaatcctttgaaaacctaagtcagatcctgctatgtccctgcgcaaagccctctgggggttgccatctcatgcagaatcaaactcaaactccttaccgtggcccaaaagtccaacgtgatcattctggctgccccctcagcccttaccctgccactctcaccaatctctgttgccaccaagctggtcttcctgctgagtgggccacaccagtcttccagttccttcttagaacatccttcatgtgaaatccggatgggccgcaccaaaaacgatgctcaacctcaccaatcatgaaggaaatgcagatcgaaactgcaataaggtacactcatcagggtgtatcacacccattaggatggctgagaccaaagaaaacagaaaataacaagtgtattaaggaggtggagaaattgagagcctcatgcaccgttgatgggaatataaaattgtgcagctgctgtggaagacagtatggtgtttcctcgaaaaatgaaacacagaactaccttatatgtggcaattccacttctgattatatatccaaaaagagctgaaagcagacccttgaatggatatttgcacatccatgtttacagcagcattattcatagttaaccaacaggtggaagcaatccaagagttcactggcagaagaatggataaacaaaatggggcatatctatacaatggaatattattcagccttaaatagaaggagattctgacacacatgctacaacatgggttaaccttcaagacattatcctaagtgaaataagccagtcaaggccaagcatggtggttcacggctgtaatttcagcactttgggaggatgcggctgacggatcacgaggtcaggagttcgagaccagcctggccaacatagtgaaacgctgtctctactaaaaatacaaaaattagtcaggcgtggtggtgcatgcctgtaatcccagctactcaggaggctgaggcaggagaattgtttgaaccccgggaggcagaggttgtagtgaaccgagatccttctcagaaaaaaaaaaaaaaaaagccactcaaaaaaaggacaaatactctgatttcacttatatgaggtatttagaggagtcacttcatagagacaaaaagcagaatgatgggtgccaggtgctaatgggtggggggaatggggagttagagtttaacgaacatagggtttcagttttggaagatgaaaagagttttacagatggagggtggtgatagaggcacaacactgtgaatacacttaatgcacttaaaaatggttaaaacgttaaattttatgttgcatatattttctacaattaaagaaaaaaaaagcgttgtggaagtcaaggatccagcccagccttctggcttgcaggcagtagaagagagcagtgttcttgatgggcctgagtcaccgatgacaactgtgtggaggtgatgccactgctgcggccacagccaccagcctgccctgtcccgatagacaccagttccaacaacctctcatctacctttcaggtaatgtgattgaatgaactctgctggcagatagtttgctggtgtttagacaaagctaacactgctggaaataacaagagtggcctggcaggaagtgtcagatcatgaatcactaaagtcaaagttatcttcagtctgtggccaaaaacaccgcccactggattaaagagaaggaactactgatgaaagcagcaacatggatgagtcttagaagggcagtgctgaggctgggtgcgggggctcatgcctgtaatcccagcactttgggaggccgaggctggcggatcacgaggtcaggagatcgagaccatcctggccaacatggtgaaaccccgtctctactaaaaatacaaaaaattagccaggcgtggtggggggcacctgtagttccagctactcgggacgctgaggcggcagaatggcgtaaacccgggaggcggatcttgcagtgagccgagatcgtgccactgcactccagcctgggtgacagagcgagactccgtctcaaaaaaaaaaaaaaaagaagggctgtgctgtgtgaaaaacactggagtactggactcaatgaccccattcatatgacgcgctggaagagccgtgaaaaaaatgagaacaatggttgctagaaatgagggaacggacggcccatgggtgtggggctggtgggaagggccatgagagaagaattcagaggtaatggaaatattttgtattttgatgagggtttggactacgtgactgtatttttaaagctcatcaaattgtacacgagatctattctggtgggcttcactgtatgtaaacttgacctctaaaatagagctgtaaacaaatattgagccctagctaatgcttgacatgcatgttgaagtattagtggcgaaatgtactgatgcctgctgcttactttgcaaagcatctaaaaataaggcgaattgatgcatatggagagaaatgtgatgagaaaaacactggcaattgcagaatctagtcggtacatatctagcgggtatgtatctggatgttaacaatttcaacttttctgtgtgttttaaaacttccctataaaatgttgacaggaataaaattatagaaattacagtttaagaaaaattaaattggctgggtgcggtggctcatgcctgtaatcccagcactttgggaggctgaggtgggtggatcacgagatcagatcgagacagcagagatgaatcatgttactcaacgtagaaagttgccatcagtaagtgaaactgacaaaaggatatcttaaaagacaaatgcttcaaatttaatatctgtaaggaaatatggctgggtgcggtggctcacacctgtaatcccagcactttgggaagccgaggcgggtgaatcacctgaagtcgggagttcgagaccagcctgaccaacatggagaaaccccatctctactaaaagtacaaaattagccaggcgtggtggcgcatgcctataatcctagctactcaggaggttgagacaggagaacagcttgaaccccggaggcagaggtgagccgagatcatgccattgcactcatgcctgggcaacaagagcaagactccatctcaaaaaaaaaaaaaaaatgcagttgattatggagactgattaagaagtaaactgcatgatataaggggaacatattaatcaaaagtagaataataaatttcattatataaatgttttcgttttctacaagttaatatataaaggacaatagcatggaattaaaggtgttgtgtttttattcaagaatgattttttttttatttttgatgcagagtctccctctgttgcccaggctggagtgcagtgggatgatctcggctcactgtaacctccacttcccgggttcaaggggttctcatccctcagcctcctgagtagctgggattacaggtgccgagctaccacacctgaccaagaatattttctttttttttgagatggagtctcattctgtcgcccaggctggaatgcagtggcgcaatcttgtcctgtctaactacactttagaacgctttcaccgtctccccaaacccctgcctcccagcccctggtatcctccattctactctctgcttccatgagttcaattgttttacattccacataagtcagatcacgtggtagttgtctttttgtgcctggctcacttcacttaacatcatgtgctccattaagctcctgtgaatcccagtttctaacctgcaattgctctaagtgttttcattgccttttcatggtttctactaagaattccagagcccagatgcaatgttttcactgctttggatgttattcattgtttttctttacatcttgtccatggacacacaaataaactgtccggtgcaagtgcagctgccgtatgcgcttcctgtgaaagaaggccggtttgacatctattaaacaaatccatctcagcattcttaacagcctttatattgtttgatatcaagctcagtcatttaaaaaatatgcctctgtctttgtaagattacctatgggttggagaagacttatgtaatattcaactcagcagataatgtatataaaaattattgcatatgatttaatgatctggaatcaattttaactgtttatatgtcacacttgggaaaaagcaggacaattataaaatttaataatggcatctccataaaaagcaataattcatattctactttaaaaatcctttctcttatgtagaggagtaagtggcatcctggtggcaccagaaggatgtactggtgagcttgtgtagtggtcactaagttaacgcgtgttgctttatttgactgatactgatgttgccatcttagcttccggcagttaggtgggcagaaaacccaaagttagtaactttggacagttgcaacaatgttagtaactcaagggccaaagtgatggattaaacggccagtccaggcaatctctggttcaccctcatgatgacagagtgcttttaggtagtgaggcagtgcttagtctcaaggcagcctcccttcccctcatgcattacctggtgtttgtgggcaggagtgtggatcctgtatacatgcctggggttgtgggtgtggggaggggcctccagtgtgctggggtataccctggggcctctgtaggtgcctgatccatagatgctccctgtggcctcgtcacaggggtcaccaggcccctggtggcttacagtgtggaagttggaggcttcaccataatctgtggcctgagcttggcctcagggaatatttccgggtggtgtcagctgtatctcctccttactcagtgtcgtaggggagcagcgactctctgggacagtgggatgggtggtaaaagaatttaccaagacagttgtaggtaaagaaaggcagattcattggacaccacagagcttacatgtttgtggtgatgtgggtgtgaacatacgattatcgacagtgcataatgcttgatgaaaataatagatgctgatgttattgttttatgtatttaatatcctatattttttattgttattttagagtatatgcttactacttttttttaaggtaactgtgaagcagcctcaggcagtttcttcaggaggtttccagaagaaggcattcttatcaaggagatgacagctccatgcctgttactgcccctgaagaccttccggtgggacaagatgtggaggtagaggacagtgaaattgatgatcctgaccctgcttagccttaggcgaaagtgtctggttgtgtcttgttttttaacaacaaacggtttaaaagtaaaataaataaataatgaaaaaagctcatagaataaggttaaaaagaaacaaaatatttttgtatagctatataatttgtgtggcttttttgtttatttgtttgagacagggtctcactctgtcacccagactggagggcagtggcacaatcacagctcactgtggtctcaacctcttgagctccagagatcctcccacctcactcaggaggacgtcagtcctccaggcagacgtcagtccccaggtggaccctggactcaaagtgtataccaggccccaagttgacaaccaggccccagatggacaccaaggccctaggtggacagcaggcccatgttgaacaccagactcatgaggacatcaggccgcaggtagacatcatgccttaggtagatacgtaggctccgggtggacattagacccaaggctccaggtagacattagacccaaggctccaggtagacattagacccaagtccccaggtgatcatcaggcccaggtgaaaactcaggccttaggtgcacatccggcctcaggtggacacccaggccccaggtggacacaaggccttaggtgaacaacaagacccagtaggccatcaggcctcagttggatacagtccccaggtgaacacaaggcccccagagggacataggcccaacgcagacatcaggccctaggtggacatcaggcctgaggacatccggcccctggtgaacatcaggcacaggtgtccaagcagaccttgggtggacataacagtgtacaggtaaggagttgacgtggggggagggtgagtagtcagcagcccagtggagtcctggagtaggtcttatggaaggaaggggtctagggaacagaaccgtaaagaagcgacgtcacttcctggatgatgaccacacgaacagaacttagaactctggtaaccaggcacccatatcctagagtcagcgccgtaaacagctcacttggtgggagacgctcaagagagcaagatgttctcgtgttgcttctccactttgagaggttgctgcttcaggaacggagggagtgagagccttttctgacgatgccgaagaaggctcatccctcaccccagacgcctgtcgcccgttgtaataaggcgcatccaggtaccacaggacagcctggggcaggccctagcaggccaggccacaccagagatcccattggggctgcagctgcacactgtccttgtccaggagattcaggagctcattgaggcacagacacgtggtgaggtggcctgcagcctggaagactttgcaggggcggtgcttttgggctggaattcccttaaattcagtgaggtcgtttctgtgtttggaaattccagtggaaagtgactgatgctggtgaccctttctcctttctcagctcctggtccatgtgcagaagtaagagcactgccagcaccagcggcggagccagagccagcatgggaagaggcccctccagagagagcactggagctggagggagctccagccaaggaccagaccaatgaggagctgcctgaaatcacggcacgtactgtagccactggccctaaccctggaactgaaagcgtggctggagagaaaagtgggagggagggggtgaccagcacagccccagccagcagctcccatgctgcccctagtcctgggcacggtggcaaacatgcaggcagagagcagggcatttggcctggcctcctgtacctcgctgcagagaggcttctctcattcactagaaccacagtcctgctgctgcaggtccgtttattctcctgatcttggtttatctgtgtgcaggaggtgccggagagcattaaaagaaggctgggaggaagagttccagcagctacgcctgctcccagaggcaacctcctcctccaggcatggatgcgggtccacagctgggcatccaggctgtttgcccctaatgtgctgcccgggacaggcccttaacaggcgggcagtgggtgaggggaccaggaggtggctccaaagggtaaagcaaacaaagcttttaacgacagccgttgtgccccaggctctccatgccaccacctgccctaccatttattaatagtgttagaattacaagttgatgaaacgagattacaataaagtttgatttctgaaacttcatgcctttttgaactccctaatgttagatggtgtttttgaggctatcctgaaaatctctgatagttgtgtcttttgttgtggttgtttgtgtggctgaattaccatcgagtcatctgttattggaaacctttcaggtatggcttttagaagaccttgacctactcttgcctgttttgactctctggtttactgtggaaagagggatgatgtaggctcatgtctccggcagatcattcaccttttgccatcaaggatttggcatcagagtttccaagaattatgtgtgcaagttgatatgctgctactttagctaatctgggtgtcaaaacagaatgccatagactaggtagcgtagaaaattgatttctcacagttctggagatggtaaaatccaaggtcaaattgtcagcggattccgtggggctgacttcctggttcatagacagccaccttttttactgtgtctttacatgacagaagggatgagggagctctctgcagtccctttgaaggggcaccaattccattcatgaggtccctgccttcatgaactgaatcacctgccaaggccccacctccaaataccatcacatagaattagaattcaacacatgaatttaaggaggacaataacatttgcttcacagaatcaggtcaccccgcaccatatgcactcacaggaaatctctaatctcctgttaagtatttgctggtcccctctgggtttagggaattttttttctttaagaaaaatgatttttcatgtgatccatggtttattcatagaaaagcactgtgagttcatacacttgctaaaaagaagggcaattgtgatacgaaaatgagagtgacctctctccctctcttcttttcaaccaactcattggactgagatgttatagggtcccttggctgggcagtaggacgtgagtagccacaaacggcaaatacaacttcttggtcagtttggagtagaaaaggtgacattttgtcaacgaaagaaaaaggaaagcagatggagaagttcttagtttgcattctagctataccaccccttccctatcaaaccccacccccagctaaggaactaagacataaaagagtaaacaccaaggcactggtaaccaactgactcttctgaatgctcttgctatctcctacaataattccaggctgagtataggggtcaggaaagtagcaggaacatgatgattcactgtggaggtcagccagggctaagacagggttgcccactggggctagaaattaggaagggagaggctaagtgaagaccagccctagcctccaagtcagcaagcaatgagactgtgacaaaagcaggcagagaaaggcaggggaagaaagcaagtacggggtgagaagagaactgtgcagtgaaaacagccaatcttgatggcagagggagactggtgcttagaagctcatttggtgagagagaatgaatagaggaggcacagagatggggaacatttaactagtgagagagatgtaagatgaatgggaagagaaatctcgcaaaaaggacacattcatgcagatcctcaaagaagaacacgcagtcacccccacatgtagaaatatactcagttacacatataaaaacacagatgcatggagagcaagcatacacacagacacgtatctctacacatgcactcatgtgtgcccagatacacacacactaaacatgcaagacatgagagcatttacacatagatatgcatcctcacatgcaagcaaatgttacaacctcacacagggacccacattccagtgtgcacatatccacccaggtacacagccatagaactgacatacgtacacatcaacgtataatgtgcacatacagacaggcacgcgcagatatatctatgcacatagacacatgtactcagtcatacagatacacacactctctaacacaaaggtgaccagtgtagatgaatattgtgagctcagtggcttcccagaccttcatcttttccctgctcttgtttcaaaggtgctcagcagactcctggcgaggctgtgtgaggcaggggcaggaccttcagagtcctcacagctttgtgaggcaaaagtctgagtccagtcctggcctctgccgctcacccaccactgggctattaatgccctgtctgtaggcgagagattctgcatagactagtcttgggatttttttctaactggccatttttctccttggcacacccactatcccactggtaacggcacacactctgcaagggaaacctgagaaatggttgtgagtctcctcagacaataagcataccctcccacccacagctacctcaagtgcccatcaaatcagaaccagaattataaatacttacgactttacagtaattggcaacacatatactatagtacttacagtaccataaatgcatctgtttctctggtgaagcaatctctgagatggaacagtgttctgtgtttgccaagggagacagggccaatgcccaggacacgcaggacataggggcagaaagtggcatatcgtgggggtttctggtcgatctgcaaggcccagcttctccatgaacagtgggctgtagtgagaagcttgccaaggtatgcatatcgactggagttggactctccccatccttagccctgtggtcctttggcctcagccacaggtgctcagagtcctctcagggtggacaaatgtctcagtgtcgttggcctgacctgatactacctggagacccaggctgccgggctggtgagctatctgctttctcagccaaagggctctcgaaccagcagcatcagctggttataaccactaaaaaaatctatatgaagagatactcttttaaaaaaaaaactatatataaattgaaatataattctaaaggaaatgtccaaacaacccaaaggaagcaggaaaaagaaaacagaaataataagcagagacacaaacagaaaacaaaaaattattatgccctaacatatcagtaaatatattaaatgtaatgatctaaatacaccaattaaaagacacattgccagagcagacttttttaaatgattcaactatacagtgtctagaaaaaattcactgcaaatataatgattacaggcaggttgaaaataaaaaaataaaaatgatacatcctgaaaatattaatctacagggaacagtcattatattatcagataaagtatatttcagcacaaagaaaatgaccagagactgagaggaatattacgtaatgataaaagggtcaattcactgagacatagtgagcctaaatgttcatgcacctttaaacatcagagctgcaaaataatgtgaagctaaaactaatagaactgaaaggaaaaataaataaatccacaaatacagttggagacttcaacacctctcaataatccaattaaagtagtcctaggagggaactaaatgtaactaaaatgctcacattagaaaagaggaaaggtctcaaatcaataacgtatgcttccacctctagaacctagaaaaagaagcacaaaatataccaaaagcaagaaaaagaaggaaataataaagataaaagtagaaatcaatgaaactgaaaccaaatcaatgagctggttcttggaacaaattgataaaattgacaaacttctgacaagatcaacaaagaaaaaaagacataatggcacaaattaatatcagaaataaaacagggataccattacagattctgcagacatcaaaaggataatgaagaatactaatacaattctacaaatattaatttgacaacatacagaaaattgacccgtttcactgaaaaacacagataattaaaatgatcttataaatattaaggaaactgaatatgtaattttataacacacacaaaaaaatctccgagctcagatggttttacttaagatttctaccaagtgtttaaagaatgaatgctaattccatataatctttttaggaaaacagaagaaacgctttccaattcattttatgaagctagtattaccctgataccaaaaccagacaaactatatacaaaacccaaaaatttgttaaaagggaaaaaagaaactatggactaatatccctcatgaatatacagtaattcaccctttctcccatccactgttctgcagtttcgctttcctgggtttgttactcacggtcagccacagcctgaaaatattaaatggaaaattcctgaaataatttacgagctttaaactgcatgcctttctgagtagtgtgatgaaatcttgcatcgtcctgctccatcccagctgggaggtagatcttcctctttgtccatcgcatccaagctgtatacttcacctgccccttagtcacttagtagccaacagttatcagatctactgtggtggtattgcagttcttgtgttcaaataatgcttgttttacttcataatggccccaaagcacaagagtagtgatatggtttggctgtgtccccaaccaaatctcatcttgaattgtaactcccacaattcccacatgtcgtgggaggaacctgctgggaggtgattgaagtacaggggtgcatctttcctgcactgttcttgtaatagtgaatgagtctcacaagatctgatggttttcaaaacgggagtctccctgtacaagctttctctttgccagctgccatccatgtaagacatgacttgctccttcttgccttccaccatgattgtgaggcctccccagccatgtggaactgtaagtccagtacacctctttatttggtaaatttctcagtctcaggtatgtctttatcagcagcgtgaaaatggactaatacgagtagtgatggtagcaatttggatatgcccaagagaagccataaagtgctgcctttaagtgaaagggtaaaagctttcaatttaaggaaaaaaaaattcgtatgctgagcttgctaagatttacagtaagaaaaaaaatctatttgtgaaattggccgggcgctgtggctcacgcctgtaatcccagcactttgggaggccgaggctggcggatcacgacgtcaggagatcgagagcatcctggctaacatggtgaaaccccgtctctactaaaaatacaaaaaaaattagccaggccaggtggtgggtgcctgtagtcccagctacttgggaggctgaggcaggagaatggcgtgaatctagaaggccgagtttgccgtgagctgagattgtaccactgcactccagcctgggtgacagagcgagactccgtcaaaaaaaaaaaaaagacaatttttcccaaattcacatataaattcaatacaatttcaataaaaatttcagtagggtttttcgaagaacttgacaagatgattcttaaatgcatatgaaagaataaaaattcaagaataggctagacaattgcaaagaagaaggaggagaaggaggcagagaaggaggaaaagaaaaaagcagggtggttatccttttgaatattgatactacattatcatgtaaaactatactaaacaatgtgatattgccacagggaatagagagcgtacgaataaaaccacttagatatgtaaatgtggaatatgacagagataacatcacaaatcactgggcaaagaatgagagtcttcattaaatgatgctgagacatcaccatatagaaaaagatagattcaagtatttatatgaaagacggtaaaattgggtactacttcatagcatactcaaagttgcctaaatgtgaaaagctaaatttaaaaagaatatatagaagaatatcttgatgacatctgagtactgccatattacttataatgctaaaagcataaaccatattgagaaaagaaagtattgagaatgtaactacattaaactaaatacttccatgtatcaagatgacaacaaaaagaaggtcaatagctaccatgggaaggtgtttacaacctatgtaactcactttattcagcagaatgtcatagaattcgtttaaaatcagacaaaatgaaaatccaagaaaaaaataagcataaatagataacaagcatatgaaaagatgctcttacctctctagcaatcaaagaagagtgcaaatgagaataatgaaataccacctcacatcagtcagattagcaaaaatcagcgaactcaatgatacaaagaattgatggagttagcgagaaatggaaaacttatacagtgctggcagaactgcaaattggtacaattactttgaagagcaattttggaataactaaaaaaaaaatgttaatatgagtaatctaccaagcagaaatttggcttctagatgtttaccagagagtaaatgcacaaggatgtatattcaagactattcattgcaacatttttcataatagcaaaataactggaaaaagaccccataaatgttataagattatatactttttaaaaaggagagaaatcctatgtatagctttttatggttgcatacatgtttagagaaagtatataatgatacacagcaatatccatatagcaatgggatacggcaaagggctccagggccagattgcctgtgttggaatcctggcacaccagctgtgtggccttggacaagctgcttaaccaatttttttctcaacctctcatctataaaatgaaggataataatagtatctatgtcatatgtctgcggtggacatttaaggagttaatgtatgtaaagtgcttagaatactgcctggcatacagcaaatttgcggtttttattaccatcattatcatcatcattgttgctgtcatcaacatcatcatcaatacaatggttacctctgggaagtacgggggaaggatagagagaaatctacagctttatgtataagtaaatatgcctacatattaacatatattaaatttgagtttaatatgaatattgttaggtgtattttagtatatggctattgatgtcatataactgggattttgctgtgtgttgcagatagttcatatattaaaagtgttttttatgtaaaaacatgaatattctgtgaaatattatggaaaaatgtttaaactctattatggattgagtgactgtaagatgaaggtattctaggaacacatttttggacaaatacttgacagctagctagcaacaaccatgttacaactgcaagttacaagttaatatttgaaaaaagaaaaaccagagaagttaaaagtatttctttttaggcacatttgagatccaaagtagcaggaaaaaggagagaaatgcagtttctagggaggacttaaacacagaggacctggagatgccacagaaatactgttagttgatataagtattagaaaaatatattccctgagaaaactattacaatatcctgcagaacatttattcattttaaaataaatatttattgttcttgaattatgtatgcatttatgttttctgtttgtctttttgcctgaggcagacttcagctatattttaaagagaaacataaaggaaacttttatattctttatgtgcatataccataatgaaggcttttgtggctgtattcctagaaagacgattctctgtcctggtgctttcagtggcaagtgaaaatagccatcgataccttgcttaaacaatagagcttcattgttcgcaatcctaagaagtctggaaggaagccatcctagggtttgttcagctgctcaacaacacccacaagactcaggcttcttctgactgcttgtttggccctcctgtgtgttgggatgttttgcccaaggtcatgagatagctgcagcaacactaagcatcatgtcttcccacagccacgttcaaaggcagaaacaaatgggggagcagaacccttgcttacctcctgttttatcaggcagaagaatctttcccagatgcccctcaagagaacttctcttccaccaccttggtgaccagaactgagtcacgtggccatccctaaatggttcactggcaaatggaattgggattgtcatgactttgcgaggctcatcacgaatttgtctcctaggacaaattctggcctattgccacctgtatctgaactaaaccagggttgtattatcaaggagaaagagccacaaagaggaacacaggtgagtcttaccaaatggaaaaagcaaaggcagaaaacagagaaaacacagaatcatgtattacctactcagttttctctgatgagatatttcacttgtggcagacactattggctgttgggaattacctacctctttcctgacaggagtaccagatttgtttatatattggatggccaagtgttttccaaaggactcacctagtggtgaatcttagttgctctgtacccattgcggtaagtccatccctgttgccagcaactgcttcaggaatgagaaacggaatgtgaagagaaatcttcggtggagcctccagaaaggggcaggagagaggagaccctctccctggtcatggagcattgtggtgtaagggtgtctttactgtcactgctgctgccatggtgcaagcctgaagggtgcagagctttagccaccatagtgaaaatgggtcctgggtgatactgttgagctctagattaattagccgtttaaccactcgactcccaaacttcttggaatgtgaaataatcatttctcttcttggcttaggccatttttgtttgatttttctgttgcttgcagtcaaatcatcctgatgccatactcacactgaaatgtataaagcaagaaatttagtgagagattttaaaaatctagataaggagctaacagaaacacatctggctgctttaaactggttgaatccacatgttcagaataatcaagtcccacaatatttaaagaaaaccttttattaaaggtgttctatgtataggacttttctgtgccccatgatgagacagagactgagagggcatagggatacaaaaacgtacaaaatgcatgatccttaaatataagaagtttgtaatacagttgaggagaacattgacagtaaaaatcctaaatgacacatcagttttaaggtaatcctactattttcaaggatggcacctattatcaaccaagtaacaaattgttctatcatatcataatgcatcaaatgttagaatccttcaccacacaaaaatcactgggtcctaaagtatacaagacaaatctttaaattcgttagatcggtccttcttttgaaatagctgctgacagctgtaatcccagcactttgggaggccaagacgggtggatcacgaggtcaggagattgagaccatcctggctaacatggtgaaaacccatctctactaaaaatacaaaaaattagctgggcgtggtggtgggcacctgtagtcccagctactcgggaggctgaggcaggagaatggcgtgaacccgggaggtggagcttgcagtgagccgagatcctgccactgcactccagcctgggcgacagagtgagactctgtctcaaaaaaaaaaaaaaagaaaaaagaaacagctgctgacatctgaatagatttactttacccctaagcaaactgaaaattcataagacatatgtccaatttttcactgaggcattttaccatttatgaacaatcatagactcattcatttagtagagtctaaattaatgagacttcactgtatttgcatttgagtatggtgatttccaatttgatggtttatctttaaatttgtggatgaaaataaaactaacagagatggcagagagcaggctgacctgctcacacttgatgtatacgttttggtatttgtggagaaagtgcccaaggcaagaaagactctaagtagtgatgggtgcattctgccttcctggggaccctgaaggagatgaagagtgctaagccttggcaggaaggcagcaacccagatatgaaatacttgagttctgaatatgtctaccagagcatatatttatcaaaattccattctagaccataaagcagatgcatcaataaataaagcagtagctctcattagctaagtcaggtttgtttcgtattttgttgtagtgacttctaaataaactttggttgtagtgtgagtgatttagcagccctggctttattttaattttaaaatatttaattgacaaaatattatatatattcaaggtgtacaatgtgatgatttggtatgcatatacattgtgtgctgactaccacaaattagttaacacatccattaccacccatagttacgtgtgtgtgtatgagagaaaaagagagagacgaggtcgcttaaaatctgctcgcttacaatcttcatgtaaacaatacagtattattaactataatcaccatgctgtacattagatccccagagcttacttgtcttataactgaaagtttgtactctttgagcatctccccatttctcccactctccagcatcaagggatgagagggtgtttcaatttctaaaacattctcttcattagaatgactactatctctattagtccattcttgcattgctatatagaaatacgtgagactgggccgggagcggtggctcacacctgtaatcccagcactttgggaggccaaggcggatggatcatgaggtcaagagatcgagatcatcctggccaacatggtgaaaccccgtctctactaaaaacacaaaaattagctgggcatggtggcgggcacctgtagtcccagctactcaggaggctgaagcaggagaatcacttgaactcgggaggtggaggttgcagtgagcagagatggcaccattgcactccagcaaaaaaaagaaaaaaaaaagaaaagaaaaaaaagaaataactgagactgggtaatttataaagaaaagaggtttcactggctcacggttcttcaagctgtacaggaagcatagcagtttctgcttctagggagggggcactcaggaagtttccaatcatggcagaagggaaagtgggagtgaggcacttcacagggctggagaaggaggaagagagagagtgggaagatgccacacacttttaaacaaccagaactcaggatagctcactcactcactgtcaatgagaactgcactgaggggcctgtgctaaaccattcatgagaaactgcccccatgatccaaccacctcccatcaggccccacctccaaggttgaggttacaattgaacatgagatttgggtggggacacggatccaaaccatatcactgtaaggggtctctgccctccacttctcatggaatcctgcaatcttggaggagagcattactccattgattgttaaatgagcctgttttagtgtcaaggtcatgaaagacaagaaatgaagctgtcccatattggaggtgactgaagaggtgtgataacttagtgcaatgtggtgtatcctggattgaatcctagagtagaaaaaggacattaatggaaagactgagaaaccccaaataaattctgcagttcagttcatagtattacaccatgttaatttcttagtttggattaatgtatcatggctacctaagacgcaaccgtaggatgcagagcatacaaaaacactctgaatatctttacagtaaatttttattttttttagacatttaaatttaccacatcagcctaaattaaactttttaaaagtaaaacacttttaataaattatcttctgtgtgacagaagatacaatgtgtttttctccagagaaactgatgatgtttgcagagtgattattgggtatagaccctactttgaagaaattcatgcaggttgcttgactttatttcaaggtaaatataatgatcactatataggctatgtggacatagctcattttctcaggtgagatttatggaagtgagaaaaaggttaaagtatacactggcaagtctgctactcattacccacttgtcagtttgtttaccagctgtgttctgagaaagaactagagttctaggaagttaagaggcaggccaaggaggttactgggaagtgagagtgtggatcttgggtttccagccttgtgtacgtaacagctatccttcaacctatactttggagatattttctgcataggatttcatttggttaaaatgttgtattgcatgggtttgtccatgggggtgttcagaggttctctttgtatttttaaactattcatatggaaaatgtcaaatatcaacaaaaaatagagaaaatagttcagtgaatcctcatgtactgatcaaccagcttcaataatgatcaactcgtgtccattcttgtttcatctataccataatcactcccccagcaacagctttcacgtgattattttgcagtaaatcccagacattacatcattttatctgtaaatatttctttaagtgatatcatttttgtaaaaaacataaccacaatatccttatcataccttaaaaaatgaaaaatagtgcctcatcaaatttaaatttccatagttactcataaggttttttttttatagtttgtttaaacaagatccatgccttgtttttggtttttatatctcttaattgtcatataatctaaaggtcctgccttttgggatggtttgttcattctgcagagctttccagtttctgggttttgctgattaggtccttgtggtatcatttaacacattcttctgtctctaggcttttcttctgctgactgttctgtaaacattcttttccatgctggtctctgttttggcaccagtggtgacctcattcactgccacggctttattccagcccacttgagatatgcacacccaattgctgggtagaaaccaccatttaagtagcccacagtcacctccaatttcaaaaagtctgtctaaaacagagggcactgtcttctctcccttcatctaccaagacttcatccctccagtgttccttctcctcagggaacggaaccacattctgcaccaaggtccatgccaggaacatgggctccatctctgacacctttttcttctgcaccccctacatccaatccattccaatccctgttaattctcccagaaccatctaacctgtccacttctctccatgtccaaggccagcaatcttgttgatgccactagtatctctaatcctggattgttttagcagcatcctaactagttttcccgtcacaattcctgcgttatttgaaattattttttcattctgcatgtagaatggtctcttgaaaataaacctgattgggccgggcgtggtggctcatatctgtaattccagcactttgggagggtgaggcaagtggatcacctgaggtcaggaggtcaagaccagtctggccaacatggtgaaaccccttgtctactaaaaatacaaaaattagccaggcgtggtggtgggcacgggtagtccagctactcaggaggctgaggcaggagaatcacttgaacccaggaggtggaggttgcagtgagctgagattgtgccattgcactccagcctgggcaacaaagtcagactccatttcaaaaaaaaaaaaagaaagaaaataaatctgatcatgttgctctcctatttagaatattcaatggctctctattgctctgagaataaaagctaaattgttaaacacagaaagccctttaggatctgaaccctgcttacttttccaaattcatttctcccctcctttccccctactttctatcctgcaccccagtcatcagagacttctcctgtatctccaaatgtgcctccaagctctcatgcctttctccattgccctcattcctttcccccctcacttgcttaaaccttactacttgtgtgtggacttcttctgttatgtgccttcggatcccctcagtgtaaccacccaaggactgttttagttattcctccagtatgttctcacacacctggatttagccctaatcatagcactgcttgtatcccactgcttgtatgtgtatgtagcagtgcctactgtgtgctaagctttggttaggacctgagtatatgcaaagaacacaacgtgcttccaactcttaaggagattactgtgtagcatttaattaatgaattggctgaattgataaggaaatgtgatggttgattttatgtgtcaacttgactgggttagggatacctagataactagtaaaaatattattcctgggtgtgtctgtgaggttgtttctagaagacattagcatttgaatccttggactgagtaaagattgcactcaccaatgtgggtgggcatcgttcaacccattaagggcctggatagaataatacagtggaggagcaatgcatttgctttctcttctagagctgggacatctatcttctcctgcccgtggacatcagagctccaagttcttggaactttggactctggaacttacagtgccccccacctccttctcaggcttttgacctcagactgaaaattacagaattggcttccctggttctctgggctttgaactcaacactcatttacataattggctttcctgattctccaacttgcagatgatgtatcatgggacttcttggcttccataatcttatgaaccaatttccctaataaatctcttcttatatatctctctacatatatatcctattggttctgtttctctggagaaaccagactaatacaaggaataaatgaatgattcaatcaattaaccaatgagtaaaaatgctcatgtaaatgcaacctaggtctgaatagattgaaggtaaacaagataataattctgattttcaaaaacttttatcaagccgggcacggtggctcacgcctgtcatcccagcactttgggaggccgaagcgggctgatcacctgaggtcaggagttcgagaccagcccggccaacatggtgaaacgctctattaaaaatacaaaaattagccacgtgtggtagtgcatgcctgtaatcccagctactcggaaggctgaggcaggagaatcacttgaacccgggaggcagaggttgcagtgagcccagattgcaccattgcactccaccctgggggacaagagtgaatctctgtcttaaaacaaacaaataaacaaactaaaaaacttttatcagcagaagtccttttgtcttttaatataaattactcagattcattcagtaacaaatccattattcacttaattttgcttgacagggctttcttaaatgtggcaaaacaaatttatattcaaagcatttcccacataaaaatgatgaagttataatacagcacataaaactttgtgataaagctattggttaacaggcttctcatatttaataactcctttgtaaatacaggagataaatatttttgaagacattctggaaacaatttcagtaaaaagttagatacaatattacatatttttctttcaaaataccaaagtgtagaatagtcccccttctttgtaagatataccactaatatgaagcttccatgactgtttatgacatatatctctgtatcaaagaaaacctgctatgactctttttgaaactattagttggtacacatttaaaaaaatttatgccaggcatgatggctcaaacctgtaatcatagcactttgggatgccaggttgggcaggtctcttttttttttttttttttttgagatggagttttgctcttgttgcccaggcaggagtgcaatggcacaatctcggctcactgcaacctccacctcctgggatgaagtgatcctcctgcctcagcctccctagctgggattacaggcatgtgccaccatgcccggctaattttgtatttttagtagagtcagggtttctccatgttggttaggctggtcttgaactcctcacctcaggtgatccgcccgcctcagcctcccaacgtgctgggattacagatatgaaccaccgcacccgactgggcagatttcttgagccctggagttcgagagcagattgggcaacatggcaaaactacatctctataaaaaaattccctaataaatttcttcttatatatatctctctctctatatatattctattggttctgtttctctggagaacccaggctaatacaaggagtaaatgaataaatgaacaaataaatgaatcgatcaatgtaaattcaacctaggtttgaatagactaggttgcatttaaccaggcatggtggcacacacctgtcatcccagctacttgggaggctgagttgggaggatcagttgagtgtgagaggtcaaggctgcagtgagctatgatcatgccattgcactccagcctgggtgacactgcaagatcctgtctcaaaaaaaaaagaaaatttagtcctaaaacaagtccatactgctaatatttatactgttctcctttaacagacggacttgggtcctcttttgatttgtcaataatgcgacaaagaaattctagttgcctttgttgacatccctaaagtaagagtcttcccaccagcccctaccatgacccctcccctgcattgtggcttctctgtggctcaatgtaatataagggagagaccagcatggtctgcagacctcagaaaacaacattacatcatcatgatacaagaaagtgagatgatggtgtgatttttcaaactcagttccaaggaataaacatcaaagaattatgcaggttattaagtcccatcaaggaaaagcatccttcactagctccctgccagctcatccccttttacttacctaaaatgcatgttccataaaattactatcgggagaactaggagaagcaaagctgcaaactctccattaagccccagtttctgagagcgtatccataagcaattctattaaggatatcagaggccctcaacgtgtactggagagtcagcacttgaaaaccaacatctaagcaaggttcttccagattctcagcttgagcaataacaagaatagctacaagcagctgagcaaagtctagcatcattgggaaaaacctacacagcaaataagaaaacgtaaagcaagcttgttctcattaattagtcatagccaaataaagagtagaggtttctaaaatatgagttgggttgaaatcttaattcaatgattctcattgtacctaaggtaataaatttaccttggagtacagcttaatccacatcctattaattatgacacataattttgaaattgccattactttttaatctttgccctgggttatttagggaaattttgaattgccaagtaggcttaatttttatatttgtacacttgtgtcaaaactttcaagttttattgcattttttgctggcataatttcttagtttaggattttattgaaatttttataactactaatatgaatacgtgtaaatgttttattatatgtagtctctttcaagaattagtttatgttgcttcttgaccatggtaacaatgattatttaaatcctacgtattttttactgcttacaagatccatcaccatttcttttatgcagtgtttttatagtattgaattcttagctatatttctagtgaggaggaagttttcagataattttttttcacaattgacatatatgggcgcattttctgagtcccaaagtgtatctaggaatgtctctgttacatttgcacattgaacaatactgacttaatataaaatacttgcatcatattctttccagcaaaattatattgaaattgtttcctttttcaggcatttatttttgtggtgaaaaaaaagtatatttttttctttatcttcaaattcagttatttttattgtttttctgaagttaatttttcttttatttaaatatctaagtccttctcctattaaaagaaaattatgttttaagttctttcattattgcttctctttgccctcttggtttttccacctggaaatactttttttgtgtgtatatgaggtctcctgattttctcttcaggcaatccctttttcatatatatgtatatgtgtgtgtgtgtgtatttaaactaatagacttttcttttcatttttagccattttagatttacaggaaaaaaaggagtgaaaagggcagagagttcccctatgtcccccttttccccctttcaattttccctaatattaacatctggtgttagtatggcacatttgttacaatcaataaagcaatatcaatacattaatattatcaactaaagtttatagtttaccttagggttcactctgtgttatattttctatgagtcttaaatgtataaggacatatccatcattacagtaacctacagaataagagtttcaatgtcttaaaaattctctgtgctgtatttcttctttcctctcttctacctcaaaccccaagcaaccactgatcttcttactgtctccataattttactttttctagaatgtcatatacttggtatcaggttggtgactttgtaaggttcacttctttcacttagcaatatggatttatttcctctatgtcttttcatagcttgattaattatgtctttttattgctcaatggtattccattttatggatatatcacagtttgtttatccattcatctatttaaggacatcttggttgctcccaaataacggcaattgtggataaagtcgctgtaaacatttgtgtacaggtttttgtgtggatgtaagtttttaacacatttgggtaaatattaaggagcatgattgctggatcatatggtaaaatgtatgtttagttttgttggaaactgtcaaattttcttccaaagtgattgtaccattttggctttcccaccagcaacgaatgagagctcctgttgctccacattctcaccagcatttggtgttgtcagtgttttggatttggtcattctaatagatgtgtagtggtgttgcattgttgtttcaatgtgcaattccacagtgacatatagtgtggatctttttatatgctcatttaccatctgtatattttcttaggtgaggtgtttgttcaaatcttttgtccactttttaaattggattgttttctgattgttgagtttgaagagctctttatatatattcaataccagtctttgtctgatttgtgttttgcaaagattttttcctgttgtgtggcttatctttccatccttttaactgtcttttgcagggaagaagcttttaattttaatgaggtccaacttatcttttgttttcttttatgaatcatgtttccggtgttgtatctaaaaagtcattctgaaacttaaggtcacctgcattttctcctgttttattctcagagttttatagttttgtattctacacttaagtctatgatcccttttgagtcaatttttgtgaaaagtgtaagatctgtgtctagattcacttttttgcatgtggatgtccagttgttctagcaccatttcttatatttttagaataattttctccagttatcctgtctctcagatctgaaagaacttgttgaacttttcctcccagtcactgatttgactttctatattctctagttctatgttccctgattctattgacattttattgatagcttctaattcattattagctttttacctgattgtttccttagctcagattgttttgatgaataagcaatgacctctccaatatgtttcgaaaatatgaacaaaagggttttgaatttaaacatttatacataaattaaatggacattaattctggtgaaatagtctgtttacctctgttgttctgccacacatattaatagtaaaatatatgatatttaatgttcaaaggtattccagtttggagaagaaattatataatcaatctctataaaatgataaaactgaattatttttctgtatggttcagctgggccttgttcttatatgtgtccctacaaagtttttatagataaaagaaattgataattattctttgttgtttttctctgtgccctacacacacagctcaattccttacaaacatgctgtttatttaaccctcacgacaactctacaagtgagaattatcattatccccatttcactgatgcaaaaactgatgcccagagtttgagaatgaggttaggggagagttctgtgcttttcctctttcattactatgcatgagcctggaggtaggaaagcgttgtttctttctctttgcttctttgttttattgggtgggtgggatgggggctgggggtcaaagggaaaggcctttggcccacgccggcatctggctccccatctgtggaatatctggggtggcagtggggtagataatgagtgacagcagaggcggattcctctttttaagaggctgagggccaggcgcagtggttcatgcctataatcccagcattttgggatgccaaggcgggtggattgcttgagccctggagtttgagactagcctgggcatatggtgaaaccctgtctctacaaaaaattaaaaaaaaaaaaataggcaggcatgatggcacacacctgtggtctcagctacctgggaggctgaggcgggaggatcacttagcctgggaagtcaagtctgcagtgagccatgattgtgccattgcactccagcctggggaacagagagagacctctctctctctctctctctctctctctctctctcacacacacacacacacacacacacacacacacacacacacaaaagaggctgagggtgactccttctatagacagagcagccaagctagagacctaccagcctagtgaagctacctacaaagcctactcattagctgaaatcctgactttgagagctgccgacatttttaggactatgacatggtgcaggaaaaacgcaaagcccaaagcctcgaccaagctggagagatggaacacactggacacactgatctcccggacttgttaaacactcaatagactgagagactggatacaatggccacaccccagatacacgaacgtaaccagagattggcccagcccatgcttattttagacccagtgatgagcaaaattaactaagccctgaacacacggaatctcccaaacacacaacaggcctgacgcaggatctacttcgtatactcagagcagtgttgacacaccaccatctcagacccgctagccatctagttcatgttgacaacccgagacccacagactgcttcccggcaccataagagatcttgcccactggagctagagtggggaagattgggaaggaggccaatttgagatgacctggagtctccagcaccgtacctttgtcctttttccagccatataaaaccctgctactaaaagtgtggtccacggaccgggagacttgatatcacccagatgtttgttagaaatgcaaaaacttagccccacctctgacctactgagttaaaatctgcatttaatacgttccccaaggactcatacgcaccttaaagaatgagcaacactaatacaaattcttaaatatgctaccggaagtttgagctgggcatgatttttataggattgtgcaggattgtagccaaagaacaggcaaacatccattgtctgtgtaaaaacatgcttgttaacgtataaatgtcattatgaacaggtactctcaacaagtagggagtgataatttataggtagtggtttgaaagctttattttcttaatctttcaaaatacaaactattatattatatataaaagattgggatatctacatactcctttgaacctaatccagtgccaaccagaatttataaaaagccatatatgctgctgagttagttacagggataaacgtttggcagaatctgcctagtctccctcaaaatctggtataatcacagccaggtactcacttctttctcgctggagctaattgtaattcctgagaagatcaagattgttaattatgtttacaataaaatatatgaaaaacaaatgaaatatgctacaattttataaacaattcctagaagctgctagaatggcttaggtttccaggtgtgtctcatttctcgcagctacccatctccatgaggacacttctatgccaattgcttaatctggtccccttattttgaactattgactgcgtgagtgctgatttgtcttgtttgctcctcctatcacagggataatctgtgtttgtccggcattgaaagttgagatgggttctgccgagattgtttgcattccctttcaaactgttcagatccagatgaagggaaaagggaagagtttatatttgtgtcctttttctttgcctgattagaattccaactgcctctaaggcctaggatgtgagcagtgatctccccttccccctacaacatacacacattaaggcaacagccaggtgactctgggctgttggtctcagagaagtgatgtattagcaaaaaagaaagaaaaaaggcatctctttctaggtattgggcttctaatgcctatattccccaaacatagattttggagaaaatgtccttccttgtgattagagaagcaatgagattttaggtgagggatggcaattcccacccccaaggctccaactctcaactttcctgcaacaaccaccaccagcaagaaaaggaggccattctcttggcacaaggtccttctgctcaccaaccagcctgcatagccatatgcatccacagggggcattattttctgctgggaccatccagctctggtgtcccttttttccttccttccttccttccttccttccttccttccttccttccttcctaccttccttccttccttccttccttcctttctctctctctctctttcttttttttcctttttcttttttttttttctgcttttgagacagtcttgctctgtcaccaggctggaatgcactgatgtgatcttggctcactgcagcttttgcctcccagattcaagcgattctcctgcctcagcctcccgagtagctgggattacaggcccacaccaccatgcccagctaatttctctatttttagtagagacatgttggccaggatggtctcgatctcttgacctcgtgatccgcccgcctcggcgggattacaggcatgagccaccgcgcccagccctggtgcttttttctaattgccacaaaggcaccatatgtgtttgtggagacctatgcaggattcctaagaaagggctctgtttcttgacctcaatttaggccaagggaattaaggagaggaggtagatttatatgacatgatctgcattccccacacagattcctgggaagccatgaagatccttcagaagcaactctatggggcacttctaggcaaaaggggcctccaccttgtgcagtttcctgtgcccaagaagggagcaggagtagcaaagaaaccactgcatctgaggggccttacagaaggacagagggacaactcagcagggacctttaaggtcatggaggaaacatgaagagaatagctggcggggggtgatcagggggaagagaatcataacccacatccatataatcagcacatattgccccctgacctgacttccactccactctcctgacaaatgcacatcttcctattatctaagttcacccggactgacagggacagagaccaatggaaagggaagtggacctggagttgactaagtttgtttcctccaacatggtagactagaagcttggaacagaatataagctgtcacagggggaaataagacacttttctcgcttccttgcatctctagcctgagaatcgtacctattaacacttccttctgccctggttgtgccactgtttatttttgagaaagagatttctaataccacttaacatcacactgtaaatcagcactatgttcttttttttcctttgcttaacttggcaaatgatgcgttcatttgaaaaagggttattttcttttggtttatttcttgtttatttctttatttttagtggcatgattctcacaatcaggctttaaggagttcataagcaaattcaaatttttctgataatagtggagataccactaaggcttacattttcagcagataaagttttctaataggacaaatattctataactccttggtaaaacaataatcaatatttagtgctgattattctttcagtgcttaaaataccttaagtgatctaaactcgatgtgtttgctttcccacttttaaggaacacattgttttggggtccaaatgagaagataaggtgaaactgtatgaaaaaatgtttgaaacaaaataagatatcttgatccaccctttttaaaagcagcagcccagtgaataaatacaggcatggtaaataaagatctctggttatcttctctatgaagcaatggccaggagagatgaatgaaaaaaaaaattgaggcagtaattttcctatttgactccctttctagactctctttggctcaccagtatttacaccaaaatttccctagttattacttgaagaggatggtgatgaagacaggctgggacgggttataaagtttatttcctaattaagatatacttttggccgggcgtggtggctcatgcctgtaatcccagcactttaggaggccgaggggggaggatcacttgatgtcaggcgttcaagaccagcctggccaacaaggtgaaactttgtctctactaaaaatacaaaaaattagccgggcatggtggtgggtgcctgtaatcccagctattcaggaggctgagacgggagaatcactgccacccaggaggcggaggttgcagtgagcggagatagcgccattgcactgcagcctgggtgacagagcaagactctgttttttcctaatatagatttacatagaaagctttcagaccatgatgctgatctgacgctcatgaaaaagggagggaaagaagcaggatttagcagggagagcctctgattttgatgctgggctgtcaaagtttaggctagtctgatcgggagcctcagaccaaagatgacccattagaggagcctcacattgggcagaaatggccaggccctaggatttgtgtcatgctcagtcactgactggtgcctttcttcaaagagcatggcctcagctcaaaagctgaattggatccaaaggtgcaggagctggaggctattagctgactgcactccttgcagatgaagcagaggcgggttctcccacgaagaactgagcagcacgcttcactgtgcttcagtgactgaagtaagcacagttactaagaggtataaccttttagaaattaattagaaagagtcactgagaaagtaattggcggtgggggggattgggaagatgttggtcaaaggatacaacatttcagttagacaggaggaataagtttaaagatctactatacaatatggtgactgcaatgaataaccatgcattgtgtgcttgaaaattgctaaaagagtagattttaagtgttctcaccacaaatataaatacgtgagctaatgcatacattagttagcttggtttagccattccacaatgtatgtatgtttcaaaacatcatgctgtagtgtacaccataaatatatacaattttatttgtcagcttaaaaaataagaaataaaggctgggcatggtggctcatgcctgtaatcccagcagcttgggaggctcaggcgggcagatcacttgaggttagtagttcgagaccagcctggccaacatggtgaaacactgtctctactaaaaatacaaaaaaattagccgagcatggtggcgggcacctgtaatcccagctactcaggaggctgaggcaggagaatcgcttggatccgggagatagaggttgtagtaagctgagatcgcacaactgcactccagcctgggcaacagagcgagactccatctcaatgaaataaaataagaaaaaaagaaattaattgacctctttaaaaatatataactcttttgtttctgagttggaaggcatctctgagttcacagagaccccaaaccaaacaggaacacatgttgacatttatccacagtgttccttgatctcaggctctgtgactttttctattccgcacacaccatccaggagaatcacatttccaaatggctacccagagcctcacccccttggtacccctaccgcacctcatgcactctgtaggtcaaaccaccctgagaagcagctgctcagtcttcctatcttccccagcatccttgcttcccatctgttttctatttctttgatagatggatgactacttaggctgaaacgctaaatgacacccactgataagagctaaatgatcacctgatttgtgtctacagaatttaacccaaataaatggctggttagtaggggaatttaaaaaaaaaaacacacatctgtacaggccaaggttggtgaaatttggggcaaagagatatgcgtttaccctttatactgagaaaacatcacctcacagtataaataatgtccaggcgcagcttttactctcaaaaggcactcatttgctgactattgacctcagccaatgtgtaactcatatttatcagccgatcaggaaattttcatactctggttaactttgtctttctatactttgattttctactctagacaaagaagcagtaacagtaataaaataacagtgaccaagtacctgctagatccaaagagtggtatttgttggtactttaattataccataggtttaatttagttgttctataaattacattctgtaattatattttacagacgaagctcagaaaagttaagtggcccaaaatcaattaactagcaaatagtaatggtagagcctgattcagtttatgtctacctgactccctaatcttttgcttaattctttctcatcccacaatttacaataagatgtcagggtctaaggcttttttttttttaattttattattattatactttaagttttagggtacatgtgcacaacgtgcaggtttgttacatatgttgaactccacatctgctggcattagtaccacctaatagttgtcatgggagagtgtagggattataaagaaaataagattggtcacgagttgataattgctgaagcaattatgcctgcctgttgcacctactcaaattaggacagtgagcagggggtcattatactaatctctctgcctctgtatttgaaattttccataataaacagaggctggtggaaagttttatatgttccataaagacattcaatagttacagatggctcagcacctagccaggacattaggaagttcccgcctcaacccagttggcccacaaacacaaacacacacacagagttacacagtttgagacaccttgtaacataaacaatgcagatatcaatttgtcatgaagatgcaaaacagaactctacagatttcagcatttccaacatgtcagcatgtgtgaatcacagcattcagctccattcactgtcttatgttccttttcatttgctcaagcccagccaagccaaaccagggatcaccagtggggagaactgcaaatgtttgcaaacggtgagcaaattaggagaaaatcctagatttacagagacatgaattattttttgcagatataaataaaaattgttctcagcttaggttctgtcaacacctcagtgctccgtgcaaattcatccaaagataaatgagttagtgttactcatacctgatgagctccaaaaaccacctgaaggggcacacgctgtactttgctcagtttgtttgcaaaactcagcccttggaatacaaagctaccacaaaatatgtggccaactctgaaatatgtgtgtgttttcaggcagccatagggcaaaacagccgtttgcttttttgatccatgcctcagatcttggcagtggttattccaggaatcccacacttttttcctccacccgctccagtttttaatcaagtaagacatgctgatggtgtaacatttgtaaaaatacaataaaaaagatttaaaattgccttatttctactatgtagaggtaactactgtgaattttaaatagatgcttctagattttaatgcatatataaactcttcaaaatcaaaatagaatcatactgtatataacttgccttgtttattcaaatatagcccatgtacattttaatgcctataaacaacatctataaaaatatttacaacgtttccacatatggatataaaacaatttattcaatcaaaacatatggtgttattgaatatttactaagaatgattattgaacatttaggttgtttttcaaatttttgcttctgaaactgagcttggatgaatatttttatagataattatttctacaaatctattattatttccttaggataaattttacaagtagaatgcaagaagatgaacattttgagacctctaatacaaacgacctttcagaaagagtatacagatttacacacctcatcatcctgcaccctaactgtgctgagtgattatttccatctttgctgattcaacaggtagaagactatatcattttattggaatttgtatttctcttattactaatgatatttaagtttttattgtgtttattgaaagtataactacatttctgttcatgtaatgttgtgtgtttattatttatctctaagactgtttacattttaatggtggtatccatttgtcatataggatacaatttctttcctcaattcttttttttttttaagagacagggtctcactatttcgcccaggctttctcaaacccctgggctcaagtggtcctgcctcctcagcctcccctgtagctgggactgcaggcacacaccaccatgcccagctctttcctcattttttattgctttttaatttgatttgttatttgggacatggaatttttaggttaaaaaatgcatgcatttttatcttcatgaattctctcacttaaatcatgcttagactgtctttccaaaacctatattttctcctattaactcttttaaaaattttaatggacctgaaataaattttggagtagggcataaggtatggacataacatttttcctcctaagcaatggttctgaggtccctccattgtttttcatataagcactttcttccatactgatttaacatgccagtagtatatgcaccatgcttatatatttgttggtctgttcttacacttttcattctgttccaatgatcttgttatccattcttgggcaagtaccaccaagctattttagctatcgaagctttgcagtaaatttaatatattagtggagaaccttggcttatcccattttattttctaacttttcttggctatacttgtttatttattcttcccagaaaactctggaatcattttattacttactgtgtctgggatcatgtcacagcaacagattatattggagagaattaacatcgttacaatattacctctcctaacacagaaacatggtatacctttcattttattcaaatattttatgttcctggagcagaggtgcactcactgtatattccatggctcacctacatagatgcccttgcattgcagttacactggggctatgtgattagttctaaccaatgggctgtgagtataaaaggcatttgccacttatggtcagaaggaatcaagagtgagtccctcacactattctccaaggttggtaaccaccgaggccacatattaagaatggtgaagctgcaaagtgaaagcctcttggatctttgagtttccacttgaaggatggcaatcttgaagtcactcagcctgcatcaggcttgaagtgagtgggaaataaaccttttgtttgtgttaagacattgagatttggggacttatttgttaccatagagtagtcccttagtaaaagttgcaaattgcttattcagtttatttccaaatgtggagttattattgtgacagggaaatttttcaatagttctaagtaactattgctaatatgagaagagcacttttgaatatagaaatgatatacctctgcacttatttccttccatttatggtagaaattctgtgacaaataaagaatatgtcgattcctcagattggtcctcttcttttgaagtattgaattttttgtgtttgcctatcttgcctgcatagggaaaagggggaggatctaggtttatcacactgggagtgttggaataagttccttcaaagattaagtcttatctttctagctcagatggagggatagggagatttaaataacatagtgacataggctttgtggtaggcagaataacggcccctcaaagatgtccacatcctaatcccaggaaccagtgaatgtgttaggctaaatggcaaaggggaattaagcttgcagatggaattaatactgctaatcatccgaccttaaaatagagagattatcctggattatccagctgggcccagtgtaatcagaagggtccttaaatgtaaaagaagaaggcgaaagatgagtcagtgtcagggtgatgcagcaggagatggatttgatcagccattactggctttgaagagggaaggggctgcaagccaaggaatgcatgtgacagccttcaaaactggaaaagacaagcaaatgagttcttccctagagcctccagaaggaacaaagccctgccaataccttgatttttagctcagtgagactcatttaggacttctgatcatcagaactgcaagaaaatatatttgtgttgtttcaagcaccaagtttgtggtgcttgttataggagcaataggaaccaaatactagctttgagtcagatctagattcaatgctcaaacccatcaatcattaattatttgaaattaaacaccttttgaaaaaccattctaaatctttgtttcattgcatataaaatgtgtataataatatctacttcagagtagatattggtaatgctggtaataataatagtggtaatatcaataatagtggctgcatttgctgaacgctaaattctggttacagagccaagtaatctacatactgggtataacattcttagctcataacttttccactaactcaccaacactcaaaaacaaacccttgatctaggtactactattgtctccatttaaagatgagttgaggcacagaagttaaatatcttgccaatagttaaagacctagtacatacaggagcttgtatttaaacgtaggcagagttcagagcccatgctcttaaatggaggccatcatgctttgatttaccatagtattaccctataccagataggaggcccatttgcctaggaggtcagggagggaacagatatatggggtaggaatgtcactcctctgcctgagatactctattcctgtttgtagttctagctcagttacctagagctctagggcaatgtttcagagcaattctccccaacaaccacccacttccttagttttaaggcagttttgcaactgccctgctttattcagcctgggaattcattccaagtgtaaactgcaattgaatgcttcaagtagcttctgtgtttgttccagatgcacttacccccagattttaactgtcctcttgctccaagtttggggagggaggtattggttaaattttgcttagtggcccttcttctttctccctagatgagtctcaccttatatatgtcatgaatcacaaatcaatgggccattttcccaatctaacctcatctatactctaatttgcagaaattcttagaaattatagccaaggggacgctacctggattcaaatgcacaggtttttgttttgttttgttttgttgtttgtttgtttttaaatatagagactttgggagggagaactgactaaatgtgtgggttcaaaccattattttaaataagtggtcctttcatagatctttccaagagaatttggaaaacgctaagtggaaacccagatgtctgttgagggaaatggttatcttctctggaccttccaccaccctctgtacatggaagggaatagtactgcaaggattgattttcccactgcaactttccttagaaaatggaaatgattagagtcagtttcagataacatttttccctcagttgcataaatcagagtgctagccagagctcattttcagatcatgttctttttgtgttcctgtcagttcctggttttcaaacacccattcatagaagagatcttatctatggaaaaagttcttcactactctggggcaaaatattgaaggatttttttcataaagctaaattattctatttaaatagccatcagcttatgtatcttttaaatttttttggcattaaaataatctgtcttttatgaaatgattctaacactagatggtagtttgacatgttttaaacacccttacaatgttaaaagttggcaatactatgttggtttcaaaattatttttgactttttttcttgtctatataattccaaaccctatgaaccactggaatgtatctttgaatagtttttcaacaagtggaatattttctgagcccttgcatttttgagaatgctcgcctgtcctagtgaaagacaaattgctggttataacattcttagctcataacttttccctcctcaaaaacagtggagtcgtttggcatctaactgttgcagaggaaacatctgaaaccaacccaaagttctgttctcctgtaaataaatttttactgaatagctgaaagatttctttcatttattatactttctccctttctcaaggcatagtacacattttcaccaaccacatgccactgagatggaatatgtggtggctgacggccaagtggctagattctagcatctcctaagttaaaatcgaatttccatactttactagccactgtatccttgggcaaagttatgggttgaattgtatctacccaaaagatatgttgatgttctaaccccccgtatctgtgaatgtcatttttgtttttgtttttgtttttttttttttgagagagggtctcactctatcacctaggctggagtgcagtggtgggatcatggctcactgcagcctctatctcctgggctcaagggacgctccagccccaacctcccaagtagaagggactactggcactcacaatgatgcccagctaattttaaaaattttttgtagagatagagtctcactatgttacccatgctggtctcaaacccctgagttcggggaatcctcccaccttggcctcccaaagtgctgagattgcaggtgtgagccacacacccggcctgaatgtgatcttagttggtgtaatcaaattaaggtgaggttattagggtggaccctaatctaataagactggtgtccttttaagaagagagaaatttggacccagacacctagggaggagaatgccatgggaagacagacccaaggaaagacagccatgtgaagttggaggcagagacttgagttttgctgccacaagccaaagaatgccaggggctacgagaagctagaagaggtaagaaaggatccttgctggaggtttctgaggaagcatggccccttggacacttccagcctggtaagagtgagacaataggcatctgttgtttacagttacccagtacattacagcagccccaggaaattaaagcaactgatttctcaaacactttgggcttcaatgacttcatgaaatgtagatgataatgtgtttaaagttgtaagattataagattgctgagaagattaaatgtgattaaatgagacaagatatataaattctggcacattttagctaataaataaaatgggttgtttgttgtcatcatcctgaacaccaccattaccatcaccaccacccccttccttggatagtcctctctcctggaaacagtttttctatactcttgaaatttttatacaaaacttgtatgatttttataacacaatagtcattttttttaaactgtggattctcaggcccaccacaaaaaatctttgattcagtgggtcttggtggaatgggtattgtttgaaggtatccagatatgaactctcattaagtattgaaagtgcaatgtcatttaagtgtagacctcgcattagtattcctgttctataaatatggaaactgaaataaaagaaaattgaaccaagtcagaaaatgtaaacttgagtaactttttcaaggtgaacttcaataacttcaccagtttgatgaaatgagtctaggccctaaacttccagataatgaggcattgtaatacctcaacaatacctccataatatataaaatatgggagatggtccattaggaggattaagaacacatgttttggaatcagaaaggtttaaattctagctgcggcacttactttctagctatgagaacttggggaaattatttaaccttttaagatcttagcttttcttttcttttttcttttttttttttgagatggagttttgccttgtcacccaggatccgcccaccttggcctcccaaagtgctgggattacaggcatgagccaccgtgctcagcccaggtcttagcttttcatctgaacatgagaataccatgtatctgggttcttttgaaaaagtgaatgagatgtcatgattaagcattattagtattattgttagcacagtaagtgctaagtaaatagtgcatttttgcaacgtacattgacatttatttcaaaaaaagaaatcagcagtttcatctgctattgactgtcttaaaggtacaaatgcctttggtaggccgaggcgggtggatcacaaggtcaggagattgagaccatcctggctaacatagtgaaaccccgtctctactaagggtacaaaaaattagccaggcgtggtggtgggcgcctgttgtcccagttactcacgaggctgaggcaggagaatggtgtgaacccgggaggtggagcttgcagtgagctgagatcaagccactgcactccagcctgggcgacagagcgagactcagtctcgggaaaaaaaaaaaaaaaaaaagatacaaatgcagggagaaagaaggatcatagattagaaatagtggctgattttagaaaagaatgctcttcatgctttcccctcctagtggcttgttaatggttattgttctgataataacttacctgggattctacttattaatatgcccttagtgattctccttgtaagatgttattctctatttttataatattgactataaaaattgacaggtcatttgattgacaggtcatactgactgacaagtcatctaccagaatacataagactcatttttaagagtacctcataactaagagaaaatgtatctgtgagaatgttctgactggttatgatttcctcaatcagtagtgcccaataaggttagtttcctgctattcttagaacatttcaccgtattcttcatgaagctctaagatgtcaagaagggaataaggcaagaaatgctttccttggtgtgggaaatcagacattctgacctcatcagaggagttggacacacagcaaatggcaagaaacaaggcaggaacctgcacaaaatttcttttatttttgcattatttaaaccattgtggatttaagtcatattagaaacagccaccatattcgaatctgttttttgttaaatgtgatatccttttttggatagctgacatgattctagttgtctgtccatgtcacctgtcctcagcaagctttgatgtcaggttgctcactccttgcctcactcactgaatgcatcaaccaggatgaaatgaacagacaactaaacagtagcttaagcatcataatacacctgtagccatcagtctgcagacagatgttcctgacttggtgtagcggctcaacaatttcctcaagaagctgggctctatttttttctgcttttccttccttggcatgtctacttgtcctcatgcttgtcacctcatcattgcaagatagctgcctcagttccagcaattacatccacagtcttgcctcctgagtataaaagaaaaaaggcagaaagagcacctcccttcgcgtgcccagctctttcaatggtaaacaaaattatccaccaaaaccttaccagccagtctctccttatatctctttagccagaactgagaaacatagccatcactggctgtaagaaactccggaaatgtgaccgagaatactctgataaacttaaagcaatcatgattcatctcctggcatattgctttccttaacaaaatcaaggtctgtttatttaaaagggagaacaccatggcagtgaatagaatttgttatagtgcatttccctcctgctttttcctttttctgagtccagtactgcacttttcagttttggtatcccaaaactcatgcatggaatcgagccctggggagtaaagatggaaaagggtggctggcaggttttagctgaggtgtaatatctgattgaagtgaccttggactaggatcctagcctgatgttatcagtcactgcagaggaactattaagagatcttaggaactgatttaagttactcagtctcagaggcgactgactgtaaactctaatctgtacacttagagtggaacatctactcagataactcccatcagttatctgccctggctccaaagctacccttccatattgtgccgagagctggcagactgcaagccacattcctgcaaaccacaatctctgccaatgaggccttagtaatgctacaagactgggccaaggaggactcgctcctcctattgcttcctgtccgcctgcaattcctatgagcaccactccaaagcttctagaattcccagcagcagctgagccccatttgcagctttcccaacacataaagaaccagctctaccagctcctgctccgtgacaagagcaccaggggtgcagtgtccctccttaacagcctgagtttccactcctctaagtttctaagttgtaataattccaacttctttttgtttccccagccatagaggtggtagctgcttcttagttaccagcaccctaactttatttttgccctttggattacctagttaacaactttatagcacattaacctttctttaggttaaattctttcaaataattggtgtgatttctgtctcctgactggaccctagctaattcagtagtgttatgtcatgaagagatagtcaaatgaagaaatcttaaaataccctatgctttcccacactggggttacttactgtagttacaggaccttcacaaagcctccaatggaagacaaggccagagagaggccactgtttattaccacattaaggttctggccccatatgcttatgtggaagccctaactttggtgagcagggttagatctggtgggtctgacaaggaggggcctgagcaccctccttttccctgggcctctttcaaagcagaagacccatctcaagcaagagacatattcagactcgtcttgtcatcaccttcccaatgtgatgggactaggggaagaacaatcaaggatgatgggtaggggcgggggtttattttgagagagaaaaaccgaaaggtcaggaaaatcaagagactgactccaaagagaggatgtcaagtgaaaacccagatgttcatcccttttcatcatctctccaaaagcctgactctcaggagcatgctcactaatatccttgttcttaacctatccatattagcattcctttctggggatgaggggcacccttatcctggagaactctaagtagagtctggtgaacaaattttgagatgctagcatggtgaacaagaacaaggtaagttggtctttaggaatatttccatgaaataaggaagttcccattttccacatcacagatcttaggtctgataaattgggatcaattgtctagctcatggtaccctcattcctaaatagcataggaggcacataaaaattcttatttatttttaaattttgctttctctagattcatcaaattgcttcattttgatgaataaacttcatcaaattgctttattacaataaatttttgaatattattacccctaaattttccttttgaaaacacatatttaaaaaactattaacattttcttgtcattgcttgcttattaaagcatatggagagtcatttaatagaaacagctatcgcttttgacctgactatgagctaggcacagtagctcattaactttactattaatctatattcacattaatggtatattgtttgaattaagcagtaccacagggggcagaaaacccaaacaccatgttaacaagttagaagtttatttgtctctcatgaaaccagtctaggactgatacagcagttccacaagcagtagagacccaagctccgcctattttattgctctgctgtcttcaacatgtggctggtatctcattattaaggattctcggaacttaaacacattgcctacgcttgcatcctactgttgagaatcagttgcaaagtcacacccagctgcaagggaggctgggaaatgcctttattctggacagttacatcttccactctacatgaggagggaagagctattggtagatgatgagcagtctgtccaacacaaggacctttgatctccttgagtagctcttcctaatttaaaaacaggtttattggtagataatccacattctacacaatttgcctatttaaagtgtacaattaaatgatttttaacatattcagagttgtgcaactatcactaaaatcaattttagaacattttcatcctcctccatcctaaataaaccctgtacccattagcagccacttctcttttacctctacccactttcccagccataggcaaccactaacctattttctgtctctatggatttgactactttggacatttcatataaatgaaaccatccaatatgtggtctttggtgaccggcttcttatacttggtatgtttttgtggttcatacatatcatggcatgtattggtacttcattttcattttatggccaaatattccactgtatggagatacaacattttatttatacattaatcagttgatggacacttgggttgtagccactttttggcaattatgaataatactgctatgaatattcacatataaatttttgtgtggatgtatgcttttatttgtcttgagtctattcctgggagagaaactgctggatcatacaggtccacgtttaacttattaaggaacagctaaactgttttctaaagtgactacatcattttatatccccatcagcaatctatgagggttccagtttctccatatcctcgtcaacacttgttaatatttgactctctgattacagccattgaagtggatgtgaaatgatatctcattataggtttgctttgcatttccctaatgactaatgatgttaaggtttttttcccctcatgcttcttggcatttgtaagtctgcttgggagaaagtctattcaaatcattagcctacccttaggttttgaaatctattgttttcaaatacacagctctgggtcaactggttacatcctgcatactaggttgggatttttttctccttttagctcctagagaaagctgggtctttatctattgtgggaattcagcaaggctcagaaaaagttagcatttacttcaaagtcatgtgatatggtataaattgcagattttattcagtacatgtagactttctgagaagaaatcctatttgaaagcaaaggagcagacaacctacaggacaagatggaactagagtataggttagtttccattttctaggttctcaagctttttaaatattaattttaagaaacaaggtacaaagctttacgaacactatttaaaaatatataagtaggctgagcacagtggctcacgcctataatcacagcactttgaaaggctgaggcagaaggatagcttaagcccaggagttcaagatcagcctcggcaacacagtgagacccctgtctctacaaaaaatttaaaacttagccaggcatgctggtatgtgcttatagtcccagttacttaggaggctgaagcaggaggattaactgagcctgggaggttaaggctgcagtgagctatgatcacaccactgcactcccacacaggtgacagagtgagaccctgtctcaaaaacaaaaacaaaaaaagaaaaaacataagtaagtggtaacgaccatattaacacacaattgaatgatataactcaactttctgtaattatggaataatatatataatgcttttagctaaaaataatgatttcagttatttacatctatttaatattttagttaaaaaataatgcttttgattacttatatctctttccacaagtgatactaaacatagcttgtgaaatatattttgcttgaaatgtgaaatacaaagtcaaataaataccatatctaattgtggagccctatactatttcattaacgaagatgctacaggtagactgagggacaaaaaaaaaagacaatataatgaaatggaaaaaatgctgacttggatgtctagcgtcaatgttctatcacagagtaaatcacttaacctctctggacctgtatttacaaatctagaaatgaaaaggtagagagctatatggatttctgaggcctatctctaaaagtcctatttcccgttttaatggtatttcataaaatgggttgtgttcaaaatgtttggaaagctgtgggtcaaacagttatgatactctttcagttactcatccaaaatctattccccacttcttccttggtttaacgttaatttgatttgagacagcaatatggctaggtccacagtgatgaattgagactggcctaacgaaatcattgcaaccctgttttcagctttccttgcttcccttgcagctactcatggccaagtcaatgtatatggccatggaaccctcttcattccagaagtatctccaaaggattacttttctggagagtatgatggcctaggctaactttactataaatagtagatagataagtgcatttcctggccagtaaagccagaatgtgttatctctgaggcatttcttccataaaacatttactctaattttttttttttttgagacggagtcttgctttgtcacccaggctagagtgcaggggcgcgatctcagctcactgcaacctccgcctcccaggttcaagcaattctcctgcctcagcctccagagtagctgggattacaggcgctcaccaccacggccagctaagttttgtattttcagcagagacagcgtttcaccgtgttggccaggatggtctcaaacccctgatctcaggtgatctgcccacattggcctccccaagtgctgggattacaggcatgagccaccacgcctggcctctaatttctacaaataaataaaaacctatgcattcatttgtgtacttggccttaccttgtgcccatttttggaaaaaaatttaaaacaaaggaagtatctgttggtcaagaaggtgcatgtctattaaaccccttgcctatcataagcctagagaacttgggagttagtgaaatataacattcatgttaatcaaccttttagacatggttgtgttgtgaagtaaaagctggaatccagtattctcagttctgtatatcattatcaccagcggtgctttaaagagaaaattataggtctctctacatctatcatacacctcctcagattcaatgggtctagaggtggcttagacatctataattttttaaagtcctacatttgattctgataggctgccaaggtgaaaaacactaagttttataaatcacagaagctatgactcttcaagatgcttaggtgagtaatgccttatggcatggtgaaaataacaccctcacaggtttcagggactcaggtcttggttctggcactcaacagctaggtaactttgatcagattacttaaaactctctgggccttaatgtgccagacttagagaggataacttttgctctaggtttaaacaacaagtgtttataaaagcacatggaaaattataaagagttcaaaaacttttaacgtagtacttaatgctattttcctctttatggagtgtcctttccctttcttttatgctgtaaaaatcttttttttttttttttttttttactttcagatctagggtacatgggcacaacgtgcaggtttgttacatatgtatacatgtgccatgttggtgtgctgtacccattaactcgtcatttacattaggtatatctcctaatgctatccctcccccctccccccatcccacgacaggccccagtgtgtgtgatgttccccttcctgtgtccaagtgttctcattgtgtatgctgtaaaaatcttactgttccttccagagcaccaagtttagatctctgaagctttccttaaaccaactgcacagaaatgttacctcatcagggtttctgcagcactttgtatactacccctatcacactgatagtgacaatcgacaacctcttgtcccctcattggtctagtgttaagctcctacagaatcgggtggggggggtgtcttaatctcttcagcgtcccctgtgcctagcaatgttagttgaggtgaaccaaaacggctatcctctcatcattgaaaacacagaaaaaaatggcctttttagaacccaattacctattttttctcttctttttcaaaagcggaatcttttcttcaatctactttttacttgtggaaccccaatctgaaaagaagatcgaggggttgggggatgctgagatctaccctggtaatcacaacacttatgataacacaggtaataatctattagtgcctgtacctagtaggtgtctggctacccatgaaacacatttatctaattctctcaacctcttataaaagatgtaccattactactccattgtattgctagataactgaggttcagaggacttaggtaatttgctccaacaaggtcaaaaggccagaactagaatacggatttcactccagaccaccaaatctgaacctctacatgcaatctggagatatctggatgattcagttcctttagtgtggctcagaaacaagtaacccggagttcctctgggctcccatttgatagagactacggtaaagtgtaattgattagacgtggaggtggaagcatccccacgagaaccatttcctcatgatgctcctgtcaccgggaagtgttctaattttaactttatttttattttaaaatttatttttagagacagggtctcactgtgtcgcccagactgcagtgcagtggcgcaatcaccgcaacctcgacctcccaggctcaagcgatcctcccgcctcagcctcctgagtagctgagaccacaggcacgcgccaccacacctggctaattttacattttttgtagaggcggggtctcgctttgttgcccaggctggtctcgagttcccaggatcaagcgatcctcccgcctcggtctccctaagcactgggattgcaggcgtgagccacagcgcccggccgctgtaactttaaattgcccgggaggactctgcagcccaaccctgcccacctcacccggtcaccggaggatgcctgtcaacttctgggagctgcaagcgcgggccggccagtcgtccgcgcgcggctttttcttcaggacagcggaggcacaccgtgctttgcggttcccggaagtccttcaggcctcagacctgtcagcccgccacactccagccagtcccttccgatcacctccagacaccacgctctcctttcggagcccgcccgccggaagtggcggcccggaactactcccacaggggggcggggaaggaagatggcggcgcccagcgtcccgtgaggagagaggacacagggatcccggggagcggccccagactcgtaaattatggccgcatctccgcacactctctcctcacgcctcctgacaggtactgtacccgccttgggcacgaccttgggggaaattcttctcttattaccacgtgcgaggccgtggttccggctggctgcaaccttggggagcccttggcgaggttggccggccaccggtgtggtgggggaaatgacctctggagtagcttggagtgaagaggtcacggagctagggtccagtcttgcactgtggctttagtggtccacacagcctcctccatccggcttctgcggaagagcggtgtcttcctgcttctttaggttttcagatagtggaagctggaggagagggcagagcagaaccttggggttccacagtcctccttatcagagcctcggcttctagccactggcttgcaatgacaaggaaggtgctttgcttccactcagaagccttgttccaatataaagggtcatgatgacaacgttgatgataatgacagttgcagacagcggagtgtagtccccatcagacttttgtctctgtaccgccagagtggtctttaatatcctttcactcgaagaaactagtgacaaatgtatattggagctggaatgttcttccttgactcttggtaatggctcatctcaaatgtcaccttttcagagaggcctttatagagaccaccctatataaactagggccccctacttctttcttttcacatcattccatttatttctttcattatggttagcacagtctatacttgtttatttatatactcgtttattatttgtttttcccaactagaatataaaccttgtgatggcagggacagtgtccatctctggtttacctctgtgtttccagtgcccagaacagtacttagtgtacattgtttgctcccaatagttatttgtggatggatgcaatttgtccccatggagatcttaaagaggacgttagatgattaactaatggttgtgtgaggaatgtgatgccggtggtgcatattagaggccagataagagaagccagggactgccttttgatcacatcccagaaacttttttcacttgtcacctaccacacacaagctctctgcaccatctggtgatgttgacactgtgactccatgaaattgcgttcttcgttctttttcataatgttattttatggctgtcttctggtctgtgtgattccagggcaattcatttgacttttctggaattgagtttactcatctataaaatgacgtaattgaagtaggtgatctcaaaggtcctgtttggtttgtaaagtggagaggtagaatagattggctagggtctggtaattgttgaagcttggggataagtaatgggggctcatggtactcttctgcttttacacatggctgtgattttccataatgaaaagttgttgtttgttgttttttaaagtcctgtgattcttttttgaatcacttctttgttacattctaccatacctgactgtgaatgttctttgatcctgatcctgggcactcattctcagagaactcatccttttatgttgcttcaaatatcttctctgtatggaggtttttccagcatgcatccttcagattagctgtttttctgcctttccattctatattgtcagctataggacaattctgcttgactactgtgaattgcccagttccagtaggtgggctgcatgtggcccatatggtttgttgctgcatcagtctttgcagtggtggtatggaaggaattaatagacagcttactccctgaagctgtgaacataattgccaaaaactctgctagtaagtggtctgtataactccctgtgatccatttggaagatctactaagagagcttgatggggaagcagcatggtgggacaaggtggcagagaaggtaaactgggacagtgttagtgatcgagtagtatcatgcctgattttgcttctaaaagttctaagtattttacagccatttaaaaactgtcatcactggccgggcgcagtagcttacacctgtaatcccagaactttgggaggccaaggcaggtggaccacttgaggtcaggagttcaacaccagcctggtcaacatggtgaaatgccttctctactaaaaataccaaaaaaaaaaaaaaaaaaaattagccaagcgcaatggtgtgcacctgaaatcccagttacttgggaggctgaggcaggtgaatcgcttgaatccaggaggcagaggttgtagtgagccaagatcgtgccactgcactccagcctgggtgacagagtgagactccatctcaaaaaataaaaaaaaaattaaaaatgtcagcattttttagctgtttgtctccttacctaattttaaacgtcctaaaatcaggagccagtgttgatggtgaataatagatatggtcttatgcttccagaattttaatgtatctattataatctttgtgtatctctaaacttacatttgtttacacaaggctgaaatgtctttcagtttctaggcactgattcataaaaatgtgacatgtttcaacgaaatgaaatgtcagtttcatagctgttttttcttcttactaccattctgtaaaatctcagtttgacccacgtaatcttttttttgttgttgttgagatggagttttactcttgttgtccaggctggagtgcaatggcacaatcttggctcactgcaacctccacctcccaggttcaagcaattctcctgcctcagcctcctgagtagctgggattacagacgcccaccaccacggccggctaagttttgtatttttagtagagacggggtttcactgtgttggccaggatggtctcgaactcctgacctcaggtgatcccccaaccttggcctcccaagtagctggaattacaggcatgcaccaccatgcctgtctagttttttgtatttagtagagatggggtttcaccatgttggtcaggctggtctcgaactcctaacctcaggtaatccacccacttaatcatgagagttattttccaaggtggttccaagacaaacacattttcatgtttatggaaaacaagcatgtcataattaactcaggtttgagaccataatttcagtgaagaagtgatttatctccagtctaagaaaattgtgatgtatttcttggggttgtgatagttctccttcccatagtccaggtgtgctgtgtgggctatctagtcatcaaacatcatttccttattatataaaagtgctctgctagctgttgtacaaaggtggtgagtaaaggagaattcttgccatcaaggaactaaaaaattagatgatgggaacaatttgcatgaagaagtgtcatgcaacatggcataaagtgatagagtagttgacaaagacagaaaatttgacagagtggtgtgcaaataaggaaacgatagaaacagatgaacaaattgtgaaacgtgtggtgttttcagtggagggtcatgggcgatgttgctttggtgggttgtgtgagtaatatgtatttagtaatatgtaacaggaagaaaactgttgcctctgggaacgtggattggagaggaaaggaagtattgaaggcaggaggactggcttgaatgctgctatcgttaccatagtccaaatgtaagatgatgaatgtaagatgatcagtaaaaatgggaagaagtggacagatctgacctatatttcagagtagattggacttgatgattgttaattgataacaggagagttcaggatgttcctgaagtcttcagatgttcctgaagtcttaagtaatggttttatgtacaatagggaacagagtagagattggttgagaataaaacactcttaaagacattttgcaatccatccatatagagataccaagagaggagatggaaatagacctgatgactctagaaatggtttgaagatcagaaattatcctataattacatttgctcagggacaatatttaatgttcagaaagagggaacatggataccttaaggtggcatacatagcaagaatagacaccatctgcaactgagaaatagaatgcagagaaccaggaacacttagtgtcatggaagccttcgggagaatctgtagtgttctatggcttgtcggaggcttgagtaggaggaggaccaaggcagagaagcattggatttgttgatacttgagagaagtttcagtagaatgactaaaagccaaatttagatacaataaaaatagtttattcctaactagactgatagagtcatactctattgagaactgtttcttcttcccttttgttgtcttaccctacttagttaaaatattaacctgaaatctatatatttcaatttattgtcatttattaagaaaaattgtgctttttattttctacttttgaaaaattgactgaacgggttgttttatattttcttaagaagatatgtagcgtggtcatttcagcattaaatgtagtaaagcatagtgatcctgaaatgaaaattttccctggcccttctgaagacctacacggacttaaacaatgagtagggctggtaaattgcatttattcacaaatctggattagattatttcaaagctctgacccatcacacagtgtagcgcttaccttagtggctggctttgcttctggggaggtgtagtcatcatttgataagaagtacgaatcatttaacctttcttccacttctctctctattataggttgcgtaggaggctctgtctggtatcttgaaagaagaactatacaggactcccctcacaagttcttacatcttctcaggaatgtcaataagcagtggattacatttcagcactttagcttcctcaaacgcatggtatgtttagaagaccattcttactctgttactttctgcctttttctctgttgagagaatttcagaaattcctatttaattaaagttttaagaaatactgtttgaaaagaacttttatttagtgtccttaaatttatccaaatgtcttgttttgattattcttaaccgaaaccagaataattctggtgtttgaggttaaaagtatgatcctgaacttattgattaagtttagagaaagactgaaaacttgtggcatatttcgacctggccaaaattgggaaaagctgaactgttgtgatacatcttttaaaattctttggagttctgtgactatatcagtaatagagaaataattgctttaacagtgtgaccctctcattttcttaaatcagcagtacatttaaaagtcttttttaacagttgcacttctgagtaaattcaaacaattcgacagtttttataattttctagcattttataatagacattgataacataagtcaatccaggttgactccatgaatttgtgggcaatatggaacttactattaattgccaggaaggccatttgcattttctcagatggaaaagggtcatagaatggcaaaatgatagctgaaaactcatagtgccagcctgaaagaacggcagacttataatttaaagtcctattttacatttctctcatctttaacttaaaactttaaattaaaatcttaataaaactcgatatgttgataagagatttaaatttctagaaatgttcaggctttttaagttgggggtcaaggataatggtggatatttagaggagaaattcaaatatgtgtaatgcccttttttatgtaaatggaactcttcattcatgagtttataattctttattaagactaatgtatgtaatttcaaatctttgtgatgtgatggaaaaggcacttaactagttatcagcataggtggctccactcccatgcctgcctatagctggttgttggctgttgatatatcagtttatttctgaggcttagtttccttatctgtaagttaaagagagagaaagagaggagatactaataatgatctatcttctttgacaactgtttagaagattaaatgagatatatattatataaaactgtaaagtacttcacaaatattagcagtagttattaattttgctagtaagtggtagagactgactctacagcccacattctgtcttcatcctgccctgctataaaatcattcagccggccaggcgctgtggctcacacctgtaatcccagcactttgggaggccgaggcgggcggatcatgaggtcaggagatcgagaccatcctggctaacacggtgaaaccctgtctctactaaaaagtaaaaaaaaattagccaggcttggtggcgggtgcctgtagtcccaactacttgggaggctgaggcaggagaatggcgtgaacctgggaggcagagcttgcagtgagccgagatcctgccactggactccatcctgggcaacagagcgaggctccatctcaaaaaaaaaaaaaaaaaaaaatcattcagccctggattatgccttaccactgagcccctccctatgctgtttgcctgagaacatggaaagtcaacaggttgacttgggctcttttttgtcttttttttttttttttttttgtgagacagggtctcactgtgtcgttcaggctggagtacaacggtgcaatcacagctcaatctcctaggctcaaacaatcctgccttagcctcccgagtagctgggactgtgggcgtatgccaccatgacccactaattttttgtttgtttttgtagagacattccctatgttgcccaggctggtctcatactcctaggctcgaggatcctgggattacagtcatgagccactgtgcctggctgggcccttgattattgaaaacttttttattgtatttggaatgttaagcctccagggaaaattctggaggagatgaataacaagtaaatttatttttctttcaaggaacatatatttctaggcttttctaaactacagaaattgaaaaccattactgaggcctaaattttattctccatatctcttagtatagtgatttccatatagcactctataaatacatgccgaattaacagatattaaagctgtgggaaaagctttcaaataatgtaaaagctggtctgattgaagatgttgctaaataaccatttgagagcatttggggccttggttttatagtaatgtgtgcttttttgtttagtatgtcacacagctgaacagaagccacaaccagcaagtaagacccaagccagaaccagtagcatctcctttccttgaaaaaacatcttcaggtcaagccaaagcagaaatatatgagatgagacctctctcaccgcccagcctatctttgtccagaaagccaaatgaaaaggaattgatagaactagagccagactcagtaattgaagactcaatagatgtagggaaagagacaaaagaggaaaagcggtggaaagagatgaagctgcaagtgtatgatttgccaggaattttggctcgactatccaaaatcaaactcacaggtactttgtttttctgatatacttacttatttgaaactctatctttagtgaaacaaaaagctaattttatttaccacctgaaaagaataatttggaactgcaggtcctgtcttagtatttttcctctcttcaatttaactgggatttgaaattaaattttctgaattctatttacacagaattgtaaatagtattgcattgtaagtattgtattaaaaatagtcaccctttcctttgcaattaaagttgaatgtttatcctgcttatttccttgtctttagtgtttttacacctgctgtaaaaatgcataagataataggttttgtcaacttgagttctggaatgggaagaattgcactactgggcttgatatgaatccacagtggccactgagtctcccagttcacttctgtgttttgcttcttgtagagcctctggggttgtcacaggtctgtggggatgtagggtgcatttttcctgaaaggagatttggaaccagattttgttttttaacctaattctagcatcctgtgccaaattgtattgccataattaagtgatttggttgtcacagtcaccctgtaagtcagacagagcattattattatcccatcatatagccaagctttgacttagcttattctgggctaaccctgtttagaaggtatgttctgggtcatgctgcaacttgagggagacctggtttattcttcttaaatgagaataaagagactgaatataatgtatgaatagtaagagtaagccaggcctctttgaggacagaaagtggtaaataatgttagagtcagatgaaaagatgagacagggaggcttttgagagcagagaaggatcagggaaagagtgatttttttttttttttttttttaaagagacttgagcctgaaattcaaggcaaaaggaggtaactagacaacttctctccttagtgaccagctttacttaaagaaagttgtttttgaagaaatgatgaatagacacaggggctttggtgaaggagctaaaaagtcttagtaagacttgtgtaatgtaactctaaaacagtgagatgaattctgtgtgataagcttgaaaacatgtctcagtggtttatggtcactaagcaacgaatcagcatgtttctaaagaaactctcttttgtcatttacacaagtggcctgagtgtcatgctgctgacaagttaagaatgactatagataagttatgcttataatgctgccaccccaaaaatgaggcctctcagcccgtaggcatcagatgtggcctctgtcaacagcaggagcttcatgtgtgccatcacttagcacatccaccctgcagattagctctcgtctcttgttgtcccatttctgtcagttacagcattcttcgcttccttcagaggagaaaccttagaaccagtcttcttcactttttgctctccgctctccccttcatcttgagtctaatttctgtcaccagcagaatcttttgtaagccctgtgacatttgctttcccatcctcatttctgaagctgccatcctagtttacattggaaacacgggaggctgttggtttttgcagcagcttctaactgttctttcttttgtcctccgccccgcttaccctgccgttcatgctgcccagcgttgccaaactaacttacccaaaatattgctttcgattttcctaacttatacgagtctatagtttctccatattagcttctgtctcaaccctgcttagtgttaaaggaacactgtaacctggaatgatcaaactgttcctcagaatcaaccttttttccctttccctgtccctccaccctaccattgaggccagtcctttcaccccaccatatttgttcccccgcctccatgggaaactggtctgcctgtcttatatccagtcagatcctttcaaggcctctgttaatcctgctcttggccccagtctcccttttcaaaacttggaatatggctttgaagtcaagcacacttgagttcagatcttggctctgacatttactagccagtgagactttgggcagttccttaactttattgagatgatatccacatctataaagtaggaataataatagatcatttaagaattaaataattaatgcatataaagcatacaacagcatgctggacacatgggagacactgcaagtttccaaataagtataggtgaacatttgattgtctgcttaatgtgtattatatttcccctaaggttgtttttgcctgtggagggacttgaagtgaatgaatatttactcggcagggaagatgagaaggagaattttaagtagagggaagagtctttgcaaaagcaaaggagtctcagttatcctggcacattcaaaaagctgcactgggactatgagtagcaatagtatgacctgagtatcatataggagaggtgcttattaagatcgaagagttaggcagtggtcatgttgtcatattggcatgtatatcaggctaaagtgttagatcatagccatggaaagttctggaagcttctttggagggatatgatcactttgtgttttgtcttatttaccttttacgtattttaaaatttccattaaattagtataggcttattataaaaaagaattcaaataatacagaagcatatattttaaactaagaaagtatcctttcccaccattctagataaaaacccctgtgtgaaatgtcgccttctctatatagacacatatgcagatagagctatggttgtacattttcttcaaaagaaataggatcattttatatatatatatatatgtatgtatgtatgtatgtatacacacacacacagttttgcaacatgccattttcttatgacagtatagttttcactgacaatattcactgcatactattccattgtatggatctgccattattaactagtcttctgcaggtaaacatttgtgatatttccagattttttactattaaaagcaactctgttacttttacgtatacgtctttgtactcacgtgagtctgcctttaggatcagtacttagaaatgtaatagctagctttaaacatttaaatctttgatgaaacaacaaatttgtttctaaaaagatagtataatttacccttcccctcaacagcatttgggaattagactttcttttttttttttttttttttttgagacggagtcttgctctgtcacccaggctggagtccagtggcgagatctcagctcactgcaagctccgcctcccgggttcacatcattctccttccttgtagctgggaccacaggcacctgccaccacgcctggctaattttttgtatttttagtagagacggggtttcaccatgttagccaggatggtctcaatctcctgacctcgtgatccacccgcctcggcctcccaaagtgctgggattacaggcgtgagccaccgcacccggccagcatttgggaattagactttctctgtagagtccactcctgcataagcagtctttaccagtttcgccaatttgatcattgaaaaaggttttgtatgcgttttcattatttacattttggtaaggtttagcatcttttttctattttgatcatttgtggtttttcttctgttatttagctcttatattcttggtcattccttattgactttttagaattctttgtaaataaattagcattttatacatcatattcattacaaatattttttctcattttgtccttttctttttttatggtattttgttgttttgttttgttttattttgccccatggagatttttgacttttatgtatttgtttttttcatgcctagaaaggtttcatcaccctgtggttacaaaaacattcactcatgttttcctctgatgcttttatgtttttgcatattctctaatgctttgaagccatctggattatatttcagtggaaggaataggcttgattaagaaaactgctgtggtagtactatagagcaaggatcacctgtttttgtaaatgaagttttattggaacacaaccacgcccacttgttctgagcatatatcatgccgcagtgacagagttaattgcaacagaaaccttgtggcctgggaagcctgaaatgcttactgtctggcgtttacagaaaaagtttgctgaccttctgtcggagagcacagactagtgagagccaagaatgatggcagacaaatagtggtggtcaactgagaaacgacttgggcctgaactgaggctgtggtggggaaagagaacaagggagagagagagaaagagagatagatagagagaaacattaaggaaatcgaatgagtaggaccttagctagatgaagtggattgctaaggagacataaaataagagctgagagcgcggagctgcagagagtttgaataccttgaggtgaagcaggtattttccagctctgtgggcccttttgtcatttattattctaggctctatcctgttctgtgagagtcagattctaaagtcagattccctgcattcaaatcctggctttggctagctgactgaccttgtgcaagttttataatctcaccggcctcagtttacccatctgtaaactagggataataatagtacttccttcatagggttgttctgagtaataggtgagttaacatttgcaaatgacatacaagtgcctagtacatgtcaaaaactatacacatatttcttaaaaaataaatttaatacctggctgcccccactggcatttggatttgctgcccctgctctagacacaattacgggcttctggaatgaaaaactagatgaatggtggtgttgagacttaagagtgtaaatatggaagaaagaaaaggtttaaagaaaacatgatgagttcaattttggataagtggaatttgagttgctactggcatatccaggtggagagacccagtggggcagggggctgtgaaaggcaagagctcagagagaatgttaggctggaagaaccaggggtcttcagcatggagctggcagtgaggtcacggtagtaaatgatgttaccaaggatcagtgtgtacagtgaccatgctgatggtcaccagaactttggggtatatcaccttttaaggattgggtaaggtatataatggacccggcaaggaaataaatggtcagagggaggaagaccggaaaagaccctgtcacagaagccaaaagaatagaacctgttcataaagggaagtgatctgggccggatgtcaaatgctggaggtctcctgagaagcctggctcgtgagagtcattttatttgccagttaggaagtcagtgttgactggttgctaaatcagggaatagtgattgctgtgtcttcttagactcttaaatgagctgctttaaataatctattttaaaataattttaagtttattataatgcttgtttcattaggaacacaggaaaataggataactagtttaagatgaacttttttcttggccacatcttccattccttcatactggctattgttgtattatttctccctttatgtagcttatatggttatatatctgaattgtcattccagatgcagggtttgatatctaaaacatagtatctgaaatctcaagaaattaattaattaattatttaatagtgcatactgtgatgtatagtgtacatgaactcattggcttccaaatgtcagcatggtaatgtgccgtcatggtgtgcttgttaaaacagtgattcctggccactgtttccagtgattcagttcccctagggctgggacaggactcagagatctgcatgtttgatgaggacaccagatgattctgatgcaggtggtcctagaccacacttcgagaaagcaaagtaggtgttaggtaggcagcgagtactagtcccagaccgagtggtctgactggatgtggagagaactcacctagtgagagccagcggagccggtcactaccactggcagcaggaaaagccgactgggcaaaatctggaccacagaagagaggcatgcaaagcaagacggatgcaccacagaaaaggggagcagcctcacctacacacacagatggaaaggtcccagggcagtaaatttcccttgtattattttatatattccacgccccaggtttctggatgaactaattgaattaaagtcctttccttctgcttattccatttaaagaagcagcaccctttgggtgacccctacccttttatctgaccttttacctctctatttagtttattacttgaagtcacatgtgttttggagtcagcaggattttttatttaagaaaatacctgatatctgtccattgatttcttttggactcttaacatctcacacgattcatttatagctaatgatagccgaggcagaaatatctgggagtcagtgatcactttcatagaactagcctttctttctttccctccttttgtttatagctgtaatatacggaggataattaactgtggaataagtgaagggccagatagtgctcatacttatatttcatctgtgggttagtgggtagcagcagcctgatgccttggcatttaggccaggatatgagccaaacgtttgctggtgctaatgccatttaaagatttttatttttttaaatgaagggaagtaagactgagattataaaaaaggaataatgtgtctcccttgagtttctcttgccaactgagctatttacaatatgtttttggagtttgttgcatggaccacactggggtaaagaaattttatttggattaggatcataagaggctttggtgactcaactgagtttatacttaatataggtcagtaaaaagcagaacttttttcctgagtaacatctgtgctgaaaagctgcaacacgttttttgagaccagaacactgaaatagattatttattggaaccaatagattatgctgttgatggaactgatatgaagtatgatctatcaatgtataaatttttttctcctagagcctagaatgctgttttttattaaaagaaaaaagcagaaatggaggatacacgttcattttagatcacttgtatagtttaagaagtcaacttactgtaatcttcagttattaaatatttgtattaagggggttttagcattcactgaatatgaattgagtgaattactatgatttcttgaattttactttattttttgaaataagtgccttgatatatttactaaatgttatagtattatttttaattatatgactagtaaatatttatttttagaaaaaatagaaaatacagataagcaaaaagagaagattgaaatcctcctgtaatttcaccatcttaaaataaaaccattttgaatattttgatatattctcttccagaaattttttctatgcatctcatatatttttgctttataaagaaatatacgatcgtagcgtaaatgccttctgtgactgaaaaaaattaatattctgcttatgtctttttgtgtatcaacatgtttaccctgtttttagtgacttttaaaatttaaaagtaatgttttcttaaaacgcaaacacataatatacagaaagtcccttcaggccatgcaataaccaggctttttattttttttgagaaaaatttcgctcttgtcacccagtctggagtgcaatggcatgatctcggctcactgcaacctccgcctcccgggttcaagccattctcttgcctcagccttctgagtagttgggattataggtgcctgccaccacgccagctaatttttgtatttttagtagagacggggtttcgccatgttggccaggctggtcttgaactcctgacctcaggtgatccacctgcctcagcctcccaaagtgctgggattacaggcgtgagtcactgcacccggccaataaccaggctttttgcatacagtttttcagcctttatctgttcatagtctgtgttttaatgttagcagtacagcctctggagtcagactggctgggttggaatccctggtctacaattttattggctttgtggttacaggcatattttttttcaagtctctaagccttggtttacttgtctgtaaaatggggataatcctccctgaaaggattattgtgatgattataagcaataatgtaagcaaatgattcactgccatattcagtaaatgttcaagaaaggttagttattattacgttagtgcatagatagtttctattttgttttataaaaatggggttatattacatgttttgtttagttatttgctttcttccctaattggtatatcttcctcatacttcctcatcaatacaattaaatctaccttctttttttaaaggttgatagtattccatagtatagatatatttagtttattgaaccatttccttgttaatggacatttaagtagtctcttacttcttgctattaaaaataaagatttgtaatatcatttaacatatatccttttacatatttttttctcaaagttagctgtatagaagtatacctttatttttgttgggtatatagcatgccattgcgtagttataccataatttatttatttctcctgttttaagtgttttttattttattatccttattatacatagtactataataaataagctaaatctataatgattttctgaggataaatgtatagaagtggtcttgttagagcaacaggtacgcatggttttaaagctttcagttttcattaacagattcccctcaagaaaagttgcaccaatttgtgctagccacctcaccatatcttcaccaatgaatgcttgatgataatgtattcttctgaataactctgtcaattcaatgtgtgaaagtagcacttaagtttttaattttgtacttaattctgatgaggttttatatttgtcatacgctgagtggtgatttgtattgctttgttgatggcatgtttgcctcccagccttctcttctgtgtttgtctttgtttattgtttgtaaggattctttatatattcaagatttgatctcattatatatatctgtcacaaatgtcttatgttgtttgtgtcttgttttcatttatctttgttttcatgtgcaaaagttaattttatgtaaccaaaggtattttcttatgagtttctggtttttatactatgcttagactttcccacatgaagattttgtaaatacagtatttatctgcattgttaatattatatttttatgattttatattgtataataaaatttattattgataagaaatgtagtttggtcagtggtataagatagagatattgccagtttttaataaatcattaaccagtgtttgaatgttctattcacaaagagtttgtgaagctctgtgcctggaataaatacctcaattctgctaatgttttaattgggatttcaatgtttattcggggatgaattgagaactttactgttacatcatcttcatttatacaagtcttcttttacgcctcttgagttctatagttttacttaaatagatcagtacatgtattgataagtgattttggaagtatttaaaaatttcttttcagttgattatttcttgagtttttcaggaatacatcaaataatgattaagtttatctcctttttcatgtttatgctaattatttcattttctggtaattgcctctttgtttagttatttgctttcttccctaattggtatatcttcctcatacttcctcatcaatacaattaaatctaccttctttttttagagattgatagtattccatagtatagatatatagagatactctttctactagctttcttcattataattttccgcttcattctgaagggtcttctgaaatgtgttatgtagagtgctgacttgattttgttccatctatttattacatctcatgacttttaacattctgctgtggcagtttttgtttcttgtactactttccttaacctactttgtttcatggggttaggttttttctagagtgtacaaatttactttttctgttcattcagctgatgtttgttgagcatctattatgttccaagtatccacttctgagtgttgtggacagaataaggtgcaggtggctgacagtctctgtcctcataggtcttactcttcaggaggagtttatagtctagtgggtctgtggtaaatctttttcaaaatatattcagcctcttattcttccatgctacttttttttcttttgtaccgtagagtcttttttaatgagtcgcatattgattcattttacctctctgtatctttctcccttccggaaagaagacaacactatccagacagtagttacaccccaaatgaatgtaagctccatggggtggggcattttgtctgtttgcactgttctgtcttctatacctacagcagtgcctggcacgtagtaagcgctcattgtgtatcggttgaacggatgcagggttggatttttattcatcacctaacagtttcacttgttggagttcgctcgcattttaagtaagaggaaccaaggctatcagtttgcatttactggtttagcagttctgtggcctgatggagggaaggagggcacaacaaacgagggaactttttctccgaaaggttttttttttttttttaaaccatgtctctgaaaccgcagggccaatgtcctgtttcccaaatctggtttttagtgtcgtctgcttctcctctctgcatatggtatgtctgtgtccagcctcttctctggtgctgtggcctgctgagttggaagaataccacagtgtgccaaagtatggtggcaatgggtggcttgctacactgtgtgaagccatcagaaaagtgttctgccttgtctcagtgagaattatgtcaagttgaggccctgctttctcattttggcacgaccctctacccctttcagtccctctagctgtgatatagctgcctctaagctctcctgcactgtggtgacaaagggactttctggggagtgggctcatctggccatggctcaccctggcttctgtccttgctccttaccaggaaggaataatgagtatggttagaatagccttgatttcccatatttatttcccatatttatccattccttattagtagctatttatgtagtgtatttttttgctatttaaataatgaatgtagtgacccagtcctcagtaactgtcttcagtttagtctcatctgtgctatatttaacaaacgcttcttgaggtttttagtatcctgtctttacctaatttattgcttctgcagatttttcttcaattttcatttttattccatcatttcagttggtttctgtggggctggggctctacaaatgctttagccaaagttccaatttagacagaaaaaaaaaaatttagctaggctactctgttttcttatgatttatttgttaagatgggatttaattgccttaagttcaatttgattttaattgaactgattgtaagtataagatgctatggtagatgccaggggaaggtaaagataaattttgtaagaatgataatcactctcaaaatatattgagaactttaaagaagaaaaaaaactgagttgagaattggctcaacatcacataagtgaaaatttgaaaaacaatgacttaaacaagtaaagggtttataatttcatgtgtcaaggattctgaggttaggagtctgtagatggtgcttaaggatgttgccaacatacctggtaccttctttgtctgttatcattagcttgtggtttttgtcctcagaccatgagatgacttccataccgtcatcatcatattgtattctgggcagaaagaagaaatgagaaggaaatgtggaaaggcagaaacctccttataagactttgcctcttaatttgggagggaaagttcttgataggaatttattatgtctcattggccaggagtgtgccacgtggctacctccagctgcaagggaggttttaaattatggcataattcttacatctatcattttaaaagcccaaatatcttaaattcagcctagtcaactctgccagtagccaacttctctgtcctgatagccctcactgggctctctcattattcagtacatccccttcttggaggaggacatgaagctgcctgcctcttctctacccagtttttccaaagaaaaataaaataccactctttagtctgctctgtgactaccaccacatatgtgtgctttaaatgcagtatatttaaatgaagactgacttgccagcttggcatttacttttccattagtggttgtggatgtgtactgatctggcagcagtttctccctgtcatcttgataatcaaatacacatttggagactcctggtttgggttgggttatatgtagtcagtactggactgtccaacagagctagcccaagtgtacatcttcatgaaaaagtgtaggtggttgatggaacttcagctaaaccagaaagcaaaccaggtggcaaagctgttagtgaacgttgaagaagttgaagaacaccgtaagctttcctctctctcacttcttgttgcattccaacagttgttgaaggctttgccttcttgctcagttttcttctttatccaagattctaccatcaacctagaaaacttcactatttctaggagttctcaaacttcatatgccttctgagatgcttgttataatgcaaatgtgtagccatcacctccataaattccttcactctgggtctggggtagggtctagaattgtgtattttaatggtccccatagcatactttgagacacactcttctaatctgtagaaccgattcaacactctctcctagctctttactgtcagcacactgccttgcttcccattactcacaagaatatgtttatttcccattaagggagacctctgcaacttacagctaacctagtctatctgaattcttacctttttttgcttcttctctcctctgcctgttctcccgcttgtccccttcagtgggtggcactttcagcctgacacctggggtcctcttagattctgcaagtccaagcagatctccctctatctactatgtggagagaatgttatctgaatcactcgagggaagcaaatgattgcctctcaacctgcaggtcagacttgcctgggtgcttaataatcattttgggttttatgaagggcttggtttttacttcaaagcaaagcattgtagcatcttatttattaagattaaggaatgaaacacttaagataaatgaattttaaaagaatgttacaagattgtctcttatactaagaaagtttttgcttaactgtttattttggaaaacctttccaaaatgtatataaagttttaaatttactagtagctttaaaaaatatattaaataagaaggaagaatagtaaacttgacaattaagaatgaaaagaagaatgctgcatgtcagtgagcttttacaaggatgcagagatgcatttttgttcatagttactctgagatattttatctgtagatggagagtgactacttggagcattctctcagcctgtggattttgtgctttctgttctctctgtctcaaacatgtatacctcaccatcttacgtgtttgccaggttaactcctttttatccttcagtcttcaactttgacatcacttttgggaagtcttctgggtttggaggtccttctatgttcagagttcctcacctgctgaatcactgttaccttgtgtaataattaatgcctgttcacttttctgaatctttatcagagtgaaagccccaagagggccgggaacacatctgtcttgttgactattacatttccattgcccagcgcggtgccttgcaaataataggtgctcaaaaaatagtagctcaatggagaaaagaagtgtagcgaactagcttgccaccatttgtagaattttgaacagcttagccttttaattacaaataattattttactgtactgtagtagtttagtggttagtgatgacagaaagcattgtgtctaaactgttaggcagctgtgcatttatagttacttggtctgcttttcagtgtctctttcaactgctgtcattgtgtcttgaagtttttagtctgttacgcgattttgtattcaggataattgtggaggattggagatggccccactgtgtttttcttaaagttcatcaaatttgtgaaaactgtaccagtgggagctcagagggatctgcaaagactttgctttgtcctgttatcagtgaattgctattaggtttgacaaactattgattttcagttttgcttaaaggaacagcaacaccaataagggaagtcttttagttgttgatcatctcaaaagtatttctaaaagattcttgctagaaagctcttttgaatgcttagaataacataaccaacattcttgcctaaccaattaataggaataaatgaaaattcccaaaggaaaagaaaacaatgatacattaatatatatgtatgcagttaggtccagatgtaaatcatgagtgagtaattgcacagaaattgcatcctgagtaggcattctaaggaagttgattcttctgcagtattttcgagatttaaataaatgtaaaagcattttactgatttgttatatgtgttctgcaaaataagcacaggtagctaaacgctaaataccatcaaagtcggaacgatacttgaaatggagacttaattctttaagtgtttatcttgtacaatatctgctctctggataaacacagttgtaattttgatatgaaactgagataaagctttatttttgtgaacactgtccaactaacaatttttttgccaaactcagttttgaaactacatgtttctgcttcttaaaagtttcagttttgttcaacagtttataggcaccagttttatggaattttttaaagttaattaaaaaggttataaatttttggttattgagtatatgaagtaaattgagtttctttattgagaagaacaaactaaaacaggatgataaggtagaaaagctctttggttcaaggaaaagcgataattgaaagaacaagcttaggatctcactcagtgttacaaaattagcttaatataacagcttttatttatgtatttatcaagcccgatagatacttcattttcctttttctgaatgctaattgtaaatgtcaaccaaatgcttcctggtgaactgccttggtgaccatacttaaatgcttcattttggaatcagtattgcttagtaaatttgaaggtatgagatttaatttggtcctaggactttcagtctaactttcatcattaattgtatgaaaaataagaaaggaaaacaggaagccctaataaattcttacctttgtggctgtggtgttaaaaacctgtattaaaagtcttatcttttaaccagaagtggttatagtttgtaatcagttaggcccctgattgataccttttaatatggctgagaaaaaaatagcacgtctcatatcaattgacttttcatctgaacttaacaataagcatgagaattaccaccttctctgatatgtctcttgagaagacaactatattatgtggttcacagaatgctgccaagctgtgaagcctaaaaaactcacttaagttagaaattcaactatttgaagcttaaggtgctaataaaaaagagatgaaaatcattaagtacagctatttagtaaaaagtacactctcatttaaaaatcaaaaaagacttaactccttcctctgaattaagttatataattttgacctttgaaatctactaacaaaagcttaactccttcctctgaattaagttatacaattttgaactttgagatctgctaacaaaagcttaattccattgcttgggcacacacataaacaaaaccacatacaaattcattaactgcctactcttggtcagctttccacgttaaacagctttaaagagattatatctcaagtttatgggacttggattacagtgttgcatagtatctgctatcaaggataatgagatataatagattacaagggtaatttgaaatctatagaaaatcttagagtttcatttagccagtggctttaatcttgctcccagatcttttatcagaattgatagttatccaacttgattttttggacttttgttttttctcttagttcttttgtggccagtgctaaaaaatagtgagtcattaagacacagagaaataagaaaaggaagatgtagctgacccattttttaacgtaatctttacagttatttttagttgatgattttagaaaattgagtacagtcattatgcttatgcttagagaccaatactcccaaagtagtgggacttaaaaaaaaacaaattcttgataaagttgcttcttcaagaaaacctcttgcatattggaaaagctaaaacatttcaagtggttctctgctgccctgcaaagtatactgtgaggttagaactaggggcctggctaaatttgtactgcgagtcctgtaaaagcctccatttatgggtgacagataaagccccttctgttgcagaagtaacagcatgcatggcagggctgcttctgcccacctccagtatgggactccctctgtgactccttccaattcccccttacaatctagaggaagaagcgtcatcatggatcctatgccagagatacagtgttaaagcctgtcttgcctggtttgtgattttgtgatcagctaggtgattgtgtgtttgtatgtgcttcattccttcagttagtggaattttctttttctgaaaatgagtctttgtagtacttactaaagaatattctggctgggcatggtggcccatgcctgtaatcccagtgctttgggaagcagagtcagaggtggaggaatcacttgaggccaggagttgaaggctgctgtgagctctgattgtgccactgcactgcagcctgggtgacagagcaaaaccctgcctctgaaaaaaagggagagccaaatattagacataaaccatatgattctcttgattagaccctggtagattttactaccagtaatttgcacatggttgtccatatagaaaatcagacattagtacctacaattgcttgctttgctttttattttagagccagtttctccagtttattagtcctgtactttatcagtaaaaagaactttaagtgtacttatgtatatttataatatttatgctattatatataaatatatataaatggatagttacatataaataaaattcatgtattcttacactgatatattcattttaagatatgcaaaatgtgggtttaaaaagaaagggttaaaaaattaaacataagtgaaagttctcctgttttcttaccatgtccctgtggtatccacacctttctttgaaatgcagtatttttgagattttaataaatgtaaaagcattttggcacactgaagtgctttgcaaatgtaagttttgtttttatcattattatttttagtctacatttattaaagggttgctatctgttcactcccctggaggagacagagagataacttagattatagtacagaagcatacagagtgtggtgtgaagtgttttgttgtttctctaaattcttttagcactgctttgaaatgtaaagtccaagtgcagtgaccagagaaatatttcacctataattttatgaaccacatttaaataatttccaagagcactgcttattaagcccttattatttaccagacactgtgctcagtgcatttgatatagtcagaaactgttgtgtctgtagaaggtgcccttggcacggacaggagcctggaagtcaagtatagttggttactagcgacatttagcttggagggacagaaactgtaggaatagtgggatttgcataattgaagggttgtgctaagaaaaaaaaaagttaattcactgctgctccagaacacagaaattgcatcttaagtaagtatttcacggaagttgattctgacttaattggagaaggaactgtcgaacagctagagctcttctgtagcagaaggggttgcccaaggagaaataatttcctgtcaccagatttggagagactatacactgagatgttggagaaaggatttacattaggagagaaattagactagttgaccctaaatcctctttgacctttttggatttgattatttgaagtactgaattatgtttagctcctttgtagtagctgcttaaaagtaatgaagccctttgtcaccaccttcaaaatacttacagcgaactctgtttgcactgttgccatcctacccaggccctcatcgcctcccacctagcgccctgcagtaacctttaagtggttccctgagtaaattttcctccactccaatcagtcctctgtgttgctggtagactagtcctttttaaatgttaccctcattacagtacatattaattttctattgcagtgaagcacattaccacaaatttagcagcttaaagcaacacaaagttattgtttcactgtttcaacaggtagaagtccaggcatgatgtgtctagacaccctgctcagggtctaaccgggctgaattcaaggtgttggttgagactgttctcatctggggcttagggtcttcttccgggctcactggttgttggtagaattcatttctttgcaactctaggactgaagtccctgtattccttctagctgccagcatggcttgctcttagctcctggaagcagcctgtagtgcttgctttgcccttgtaagtacatggccctcataagcagttctcattgtggaggtttgctttcttctcacccagtcaaggatgtttcagtctgttttcttttgcttatggaactaggtaatttataaagaaaaggcatttatttcttacagttatggagtctgagaagtccaaggtccagggccgcctctggtgagggtcttcttgacagtgaggactctgtagagtcccaggcagcacaaggcatggcatggtgagaaggttgagtgtgctagcccaggtctgtcttcctcttcttataaagccaccagtcccactcctatgatagtctattaacccattaatacattaatccattcatgagggctgggccaccatgacccagtcacctcttataggcccaacttcttagtactgccacattggggattaagtttcaacatgaatttctgaggggaccaactttcagaccatagcccagggcatatctcattgtgattgtttcaaaatttttaaatgtaggtgtgtttttttttttttcttttttttttttttttgagctggccttgctctgttgcccaggctggagtgcagtggcaccatcatagctcactgcagccttgaactcccatgctcaagtcatcctcccacctcagtctctcaagtagctatgactaaaggcacatgccactgagctgggctaatttagtttttgtagaacagggtctcactttgttgtccaggctggtcttgaactcctgacttcaacggatcctcccacctcagcctcccaaagtgttgggattactggcatgtgccatggcatctggcaaaaaaatttttttgttttgttttgttttgttttttaaattgtgggaaacatagtgggaacttattcctggagaaggcagaggcagataagagaacatctggagcaaatgaatcctggacaacagattggacctagtagtcaggaccatctttagtgagggctgctactggatctcttttcatggagaagcttgaggttctctacctggctttccacccaggagtggggatgagtcaagctctgttggtttgggaatattactctcccatgggctcccagagtcattcctgggcctgcagtgcagtgcctctgggcccatattagatgggtcatgcttcattggcaacattgattttatgtttatttgtgaaagggcagaatacgagattaccaaataaaatataatttcaggtattattaatgagggaatagattgcattcacttttaatgagattttgctgttacaaaatgattccatgtaatgaaccccaggaaatcaatggaaagtttaattacagctatggcagtgttgtatgagaaaatcgctttggtcaattttactcgtacaatttatccgtcctcactgcctttttcaaattaattgctttgatgaaataagtataaatacattctttgttagcttttgggtttttttttttagaaatgtgttacaaaattcaaatttccttctctctagtaatagttgttattatttttacatgtattaccatttacaatttgtacattttaaaattaggtagtatttccattttgtaaatttcatcattattatgtcttactataaaacaccgttcttgtccctttgttagctttttataaatcactttttgtctcttctcaatttatcagtagattcagtcaaacatttgatgtactttctctgtgcttcatcaccccatcaagctctggggtgaataaaaagaataacaagatacttcctcctctgattaacagttttcctgtcatgtaactacatacccttttcaattttaaacaaaatgaactttctttttagaacatttctattattgacagttcagtgattatggggctttcttgtccactgggatggtaaatgacttaaaaaaatttgttaagcacaatacaaaatgtggatctggatatttagagatatttaaagtataatacatcgtcccttggagtatccctgggggattggctctagtatcccatctctagtttacttatgacacctaatgcaatgtaaatgctatgtaaataattgtcgtactgtattgtttacagaataatgacaggaaaaaaaaagtctgtacatactcattatagatgtaactattttctttccacatatttttgatccaaggttgattgaatccacagatgtggaacctatggatacagaagtcttctatttttgtgactctagattttactaactgtttatcgagaatgttatagtagattttcttttaactattacagttgtttatgagtagtaaacaacgctacgtttgtgttcaaggccttaaaatatagtcagattattttggctgatttactctatggagagaagcagtttacttagtttgattttaagagagaaacctctgcagtctccttttccctcaaattctcccattgatactatcagcctttcttctgcatggtagaattctgatacaaaagagaggcagcctggatgttaaggatttttcttctagtcctggttgtcactgacgcaatatgtgaagagtcgcctaaccagtctggagagctcttgagtcttgcaaaaaaaatggctcttgttctttaacactggcctgtccaggaggttttgcaatttatggtgtgatatctacaaagaacgaaaaagcttcctcaaagatgggtgctatttgagtattctaaatggagctttgttgtttgctttaaaaatagtgcctttcttgatggtctttaaatgtgtgcaggtaaaactaaatggcctatgacaggagagactgttcgttccccattggcacaagggtaaaatatacctgcgactactgttttcagagtcagtaatcaccatggcattttcctttgggcataagttgttaacagaattagatagctaaaactttttccagaatgtttactttgaaattgagtattctacctttgattgctgccctctgctccatgtgattctttgctgctgttaggtaccttgtgtgtacttgttgtgttatgacttgtagtagcatatatgggccagaacaggctgtacccctaagcagaggagatgtgagaggggacaacacatgctttctggcctagactccccacctcagccatgctacctttctcctgaatgtgtgtgtcttcatgacttctgattagcctctcgtttgccttcagctcctaatctgctcatcttcctgtaatctttatccgaacctgcaccctcattcctgaaccttgctctctacttatatctgtgcatgtctctcgtttctggaggtaaatcttcccccaggagattcagatgcacaccatatttgggaacaactgagttaaaggaaggaccccttgccaaaatacttgtgctctaggtactttgagttgagatagttatacttaaggcaccttacgaactaccatcgaacccagccatagtattcatttgatttagcaatatcaagaaatccgtgacccatctagatattagggaaggggcttgttcatatggtacaactataaaggattattgtaagttgctgataagactagattgaagaacataccagccaattcatgattattaggaggaactaccagtttctccagcatgtacctcctgatgccaatagtggtgccttcctgttctgcttgctgtagcccccctcatggttactggacacccatgccaccttattgtcttgatgcatgtccccaaatattctttgtgtctttcattcttttccttccccccatctgtaaaggtctgactttttcacatacttctctgcatcatgcatgctgccccttgatctcatgcattccctcaggctcaggcatggcctctaggcaactccagagcttcatgcctctccagtctctcaagtctccctcctgagctttagtttcatatttcgtctgcgttctttatatttctacctggatgtcccacggtttctcaaaacagcacatgttcctaaggccagctagcttcatcacctctttccctaatgtccttacttctgttaatgttatcattcctttccatgtcacccaagtgcatggtaaatggtaaagtgcacttttccattcattcttttttgttgttttatcttcctacctctcccagttaccaggtcctaacaattctctaatcaaaatatcccatttttacaacccttattcacaatgaattaatggcatggcctcttaacatgtttctctggaaaactctctgcctctcttaagtcacagtgcacagatacttccacttatagattgccttcttgcattagactttcagtgactctgcactgccaaccaaccaaactacaaactcctcagcttgctattctgcagtctgacatttgccacctttcctcctgtttttccagtaaatactgctctatgcctagctcagtgatagcccccccaaatacagcagtgaactacacagacaggggtcctaccttcatggagcttatattccagtgaggagtcagagtgtagtaagtgtcatgaaggaaataaaaggaggatgtgagcgagggagtaactggggagacttacgttagatgaggtcatcaggaaggttccccttaacaagtagtatttccaatgggatctgaaggatgagaaggagccagctgtggaaagaggcaaatgaaacaaaagtacaagaacccagggacaagaaagagcttggaatgctcaaagaatagaagaagtctcatgaatggataatagtgattgagctaaagagaagtgtgagatgcacttactggcagagaaagagtttacattttatatcaggtatagcatcaaagaattttcaatgttcaaagcagcgatgtgatttgatctgttttcattttaaaaacatcactctgaagagaagcaagatggaagcaaggagaccagttagggggtaaagctcttatggcaattgcttggactatgttagggtttctcaagctcagcactactggcattttaggctagaaaattatttgttgttggggggtgtcctatgcaccataagatgttaagaagcatcctcagcctttatccactagaagacaagtagcaccctcccctgcaatcaaaagtgtttccagacaatgctaaatgtcccctggggggcaaaactacccctggttaagaactgctggactaaatgctggcagtgtgatgggtttgaaacatagtgtagagatagaacagacactactttgcaatgaacgggatatagcgagtgacaaaggagataatcaaatatgcttcctaggtttttggttgaagaatctaggtagatggtatcatgcatactttggattcttgacataggtcttcccttcccttgtgcctgttcttggaattatccatgtacctgtaatgttgctcaccctaccattctcttcctttctcttcatcctctctagaaaatccaacttaaatgtcatcttcttgaagctttcccagatttgcccaccaatggtgatcctttttccagcggatttctacagctgcatatcagcaccactcttggacactttctggccctgtcagcttctgtaaaccccaggaaagaagcgccagggcctaccgaaaaggagcagccttggtggaagcttgaaatgtctggctttgattctgtacctcgcctcttcccttggttcctgctggtggcttgtaggattatcatctcccactacgcattctctgaccgctgggaccatcatctcttataggcaagaccactcctaggcttgtctgcagtttgtcacagacttgggatccttgttatttgctgtcttgtgttacagttattaaggcatatctgccgtctccctttcaaattagtcaagagcaagaataagaccatatacatctttatccctggcagtgcgtactgattacaaatttggtatttagtaaatgtctgttgaatgaataagtgaatgattgaatctggaagactgaccttattttttttctcttgagtatggaattaaaagaaaattaacatttttatataattagtacatgtagtttttataatcagaaaaatgtggatcttttttaagccaaagatcagcctgtactttgtgttattaatataatcaattagtttatatgaaggatggcttgttttttgtcgttctggcctttacagttgggactcctgttggtaacagtgtgtctgctctgtttctgtatcgcagctctggttgtaagtaccactgcagctggatttgcattggctccgggcccttttgactggccctgtttcctgcttacttctgttgggacaggccttgcatcctgtgctgccaactccatcaatcaggtcagtttctcactttcatctaaattatgttattgtcactttttcctagatggctgtattgtcatatttttaaataccttccaaactcatatattgatggagaagcatttgtaacactatatatcctataggagcctgtgggtttcataaccaatttgtcttttcttttgaggtgaatggttttcagatatgttcaggtgagagagcagtagattagatgcttcaaatgactaggattccttgggttaaaacatgtttttgagctgtcataactttctactcttagtggtatctttgtttatccatttcagatacatttccctgagcttgtcattgtgcactactctttcttggtttgatttctttgcattttaaaccactgctataaagaacagaatatattttaactatgcatattcagctatttttaaaaaatcataatttagtactcagttaacttggtatatggaatacggttataccccaaaattagcatattatttttaatacatccccccctattattttaaacatcaaaataattctcccaaataattttttttcccatctagtcactgtggtctgccttaacgttgtggctttttcataagatattatagtgaaaaattttggccaaaacttaaggaaaatcgttttcattaccagaacacccaagaggagttggctcagttttaaaacaggaattcaagttaccagcaggaaaacagcttggctgagtggacatataagttgctagtgtgcaaaatacgtgaatttaatgtgataatgcctatagtcattatggttctacaatatattgtcagctatttggagaaggatcaatctatttcaaataagtttttttgttgttgttgttattttggatgtcaaaacaatcttatagtgaggttcaaatagtgctaccactttaccaaaaagatcatccccttctataaagcaggacaccatctcttccaagtagtttcttccttttgctaccttcccatgttttctggtaaagagaataaacatgattccaccatgaacatatttttaatgaaaatgcgaatgaaaagcaatataagccaaattgatttatttgtccatttgggtctattttttatttttaaaagttactacctctatttggttatacatctgggacccgaggttaagccaggagcacattctagttttcagcctccttttcgtaaattgaaaagccacatttatccttgagatactaattatcttaaggatttaaattatgttgattcaaagaaaatgtttaaaataaaatatggacattcagagaaaaaataactaaaaagcatcaaatggttcagaagctcctaaatattataaaaaataagagttgtttgagttggagctgctcctcctcccctctcatcccaccccttttcttttcaaaaataggtagctcaagaatttatcatgaaaaaaacctctcagttggatcaagaaagtatttggaggaataaaaattgaatgatttacatttagacagaaattgaacataagccaaggttttggaaattttaaaaggatgtgtttaggtggctgcttgatttttagtctgtagaagtatttttgctatagggagcgagttggattctgtaaattttaaaaatacgggggaaagccacagaatgcatgttgggattctttctggtcctgaaaaggtgcagtgtctgcctctttcctccttaggctggttttccagccctgctccgcatcccacttacacagcactcctgatcttccgctggaactccgtgtcatgttcctccatgtgtcactcatcccacacagccctctgcagtgtcctgagtgacgtgagttcctcatcagtgcttgtggtacaagtgaatttctccatctttttgtacccctcatattgcttccttccacttgtctcaggctgtgatttcgtttggaagcatcacaacactttaaaaatctcaacgattcccagtagagtagaatcctagtgttatcattatggtatcagtcagcttcccaaatcataatatttcccaataatgttagggatattttagttccagtgttaggcaatcttatacatttaaaataaaggaatgcaaaatcatttttattagtgtttttaaatagggtaagcagaacaaagagcactgggcaataagggttcaacagagtttttgggcagcatataaataaagaaatagtccttagcaaaaaggaagagtttactatactttttttagagggctagtgttcaaattaaaaatacatatatgcggttggtctgtataaaagttcttcacttctaataaaattctatgggaggaaaactttccttctgttcgtatttataaaaagattcaaattttatttatattttgtatttattaatattttcttttagcagttattcatttagttttcagtattctttgtactctatttctgtgatctctgtgaaagtagaaaaaataaagctttggaaagctgtttttacttttgttttaaggagagaaaatgaaattcagcttctgaattatgaagaagtgactagtgcataaagagatttgtgtaagaaaccactaacattaaaatgttagagtaaattacgtacatattttgtaatacgtacacatgcttcatttgaaaccgtagtgtggctttaaagcacatatgccttcaaaggatggaaaaatccataaaatgttttgaattttgcagctgaaagataaaatattgtggatggtttaactgatcaagtcttgagaaacaagtgacaaactgaatagctgaattaacaaatttaaaaagataagaattatcaaaaaactataacattattttgaggatttgacataatagtgttataataagctataattgggattattttacctagattacatatacgtgattttttagactggttatgtcagtcagtgtgtatgtcagtaaatacatttctacaagatacattttaatggtgagatgatattccattttatggatatgcctcaactttctcaaccagttctccattgttgcagctttttgcttctataagtaacactgcacagatctctaattatttttaaaggacaaattattggaaatgaaattgctgggaggatggctgccagttaaagcacacatgaaactgctttaacttcagaataaatgatcttaacaaaataattaattttctacatttatacagtgctgtagaatttgcagagcatatttacataaattattctttaaggcttataatccttaaagtaggtggtattccttctatttctatgtgtaaaacattttgttttgctattgaattattcttttagaaggcaacatttaaaacatgtatcatgcaaataatgttttcattgcatatcagtgagaaaatatagataagcaaaaataacaataacaaattttattttacttttcctttatgccggacattgttctgtgttagagatacagctggaaacaaacaaatatcttgcttttgtagtgcctatatctcaccacccaaatagatccatttgttaacattttgatttatattattatagacttcttcacatacacacatatcttcatatatataacatatataaaacatatttaacatggatatcttcacatatatatcatacatatatatagtttgggtatattttttcataaaatagtatgtcatggacatctcgccatgtcagtatttggtatagcatgtttttttgtttttgtttttttttgaggtagggtttcgctcttgtcactcaggctggcatgcagtggtgcaatcttggctcactgcaacctcctccacctcctgggttcaagcaattctcctgccgcagcctcccaagtagctggtattataggcgcccgccaccgtgcccacctaatttttgtatttttagttgagacgtggtttcaccatgttggctagactggtcttgaactcctgacctcaagtaatccacccgcctcggcctcccaaaatgctgggattacaggtgtcagccactgcacccagccagcatagcatgattttaagagttgtatatggatatactttgatttgtttaatcagtttctccttattcgacattttagggatttctagtttttgtccatgtaaacaatgctgagctgaaattcttttagctaaatctttgcatatatccttatttatttcgatagttttctaaaaatatgtggtcatgtcaagagattatgaagttttcaaaataaaaagttaaaattaagaaaaactacttcaagtaaaactaaatgtcttcccagtcttttgtttgtttgaaatcaacttacacttctgtttgtcagtgtgttaaagtgctcatcattaatgccgtgaattggaaaatcttggctcggtttgtaggtaacatcagaaatgttcttttaattcaagttgttttgatgacttacgaggtgggagtgtgtttactttttagtgcttattggccatttaggggttttttggtcagttgtttgctggtgagtttgcctgttttgctgttgggctgcttgcctttgtctaagggctattgctgtatatagtttgcattgacttataaggtgcaaatattttcttcagtttttgtctttaatgttttacagtgcagatgtttcatgtttttacagtgaggtctttttattttaatacaaatgtaatacagaaattttaataatttctcatcttagcactactagcagtttggacaagatgtctgttgtgtgggctgtcctgtgtgttgcagagtgcatcccagcacccctacttctacccactggacactgacggcactcccccacccccacttgtgacagctgaaaagtgtcttcagacatcaccaaatggtccctggggccccaaatcactcccaattaggaaccactgctttaacaatttctactttcattttttttttctgagatctttgcccaagatcctggctataatttctgtctcaggcaaacgctggcccacatttctttttgtttaattactcgtggatagctagggtgaccatatgtacttctttatgcctgtgttcatggcgtaattactatgaatgcctcttttactttcaagtgtcctagtttggacaagtaattgtatggtcttgctattcatagcccacctatgccttcaatctttcactgtaaatgagatgtaaaaatatctttgtatcaaaacaaatctcctctttggttctttttttttttctttctttctttttccacaagtgttcccatgagacaagtagagatttcctgaccacagccaaggtcacctggctggcctcagctttcaccctctttgtagctacatcttgctctactgtcagcctaattgtactgttttacacacacacacacacacacacaccacacacgaccttagaaaacatttcacatccattattactctgctattagcaaattgttctagaatcttgatgactgatctccttagtttttacaatattcctagcagattgtctcctcattactatggttgtcactgattcccaaggccactggctctataagtggacagccttgatgagtagaatgctcttcctcatcctgagccaaagtcagcctccttataacttcaatctgttggtcatagttctgctatgtggaaaaactcagtgttcttttttctttcatatgataatacttccagtgtatcactttctgactatggttagtagccacttgtagtattgctgtatagttattcatttatatctctttcctagagaactcttaacttctggaaaccaatgattatgactaacatattttgtacatccatcacctctgcccacaagcatatagagcaagacagtagagtacaactttgaaggaatatgtatgagggaggggagaaagtagcaataagtgttcatgataacactaattgcagcaaacacttgtgctatatgccaaagaatgttctaagcattgtacatacattagatcatttgtttgagtctaggttcatcaggtttcaaaaaaaagatagttcttttgaaagatcaaataaatggtgaatgaattcataacttagtcttagctttaaggaaaaccattgatgttctcagcgactttactttggagaaaattagaagaaaggcacaaaacataagtagagtttcagatctgagaaccaggttataattagaaaggtaagtgtgacaagggtatgttatctttgggatctagtgtatctgtgaatgttgaataatttttgtgaaagcaaatgaaagatcaagaggtgtgaataaaatagggtcaagaagagacatgttttttgtttaatactgacaatatttgagagacattcatggctgaaataaggtaaaaaaagaagggctttggataaagagctctgaattatagagtaggtagggcaaaagaaaatttacatctttttaaactctgaaaggaaaaacaggtaaagatttttttgttttcccagtgaatatgagattaatatctaatgcatttttctccattttccttttctctgatgtttcttgtgttttgactatacagtctgcctagagcaatagaaactgactttcatcttctatgttgaacaaaagtggttattaaatttgatgttgtattctaggagaataagacttatgttagtgaataccagtgatgtgatttattgaacatcatacatataagaaaaaatcaatatgaaaaatatatttttcttctgaatgttgtgatttgtttgactttgatgttttagctgctgggcaacttgcattcattcagtggtctctgaagttgataactcatggcttattcagatgattcaaattagctactgcactagatcaggtttgcctagagagttcttgaataccatgtgggaaagagtctctaactaaatatggtttttatatataaggaaaatgatgagcattactgaacaatgacagaaagaaaatgcattttgaatgcagagtctcttttcctgaatttaaataacctcaaataatttctaaattacatttgattcccctttccagaatgatccatctcagtggagtgaatttggcattggtgtttataaccaaaataactccaggtgaggttttgccaacaaatgcagaaattatgataattcgaacgtatatttgtaaatagtttttcaataatttacatgccactggtcattattcgcttcttaatgatgactctgtgaggtggcattattccagtattgtagaagaagaaaatgaagcttaatggtactattgatcacacgtgtttgaaagtggtcaaattgggagcagaacctgtggacccagttcactactatttcctctcaaatgagatgtcttattccagtcactaccttggaatcagggtattctttattaatatgagtcttcctgctaccaggttaactgctgacatccttgccacggtgtagtagaggtggagttaacatagtggatgtggtgatgtatctacctctaacgacatcgagtggatctagagcacttatgtcttagtcaaactaagtgttccattaatgttagctattattattgttattaacataaaagtttggtcaggttttggcccacatctttcacatgttcagagtctgaatatcttgcagttatctccagtgttggttgagtctagattcctgggatttcagaaaaaaaagaactattttggaagatgaaataaatggtgaatgaatttataacttagctttaaggagaaccattgatgttctcagagactttattttggagaaaattacaagaaaggcacaaaacataagtagaatttcagatctgagaagcagggtcttaatgagaaggaaacatgtttatttttctcagagtactaagacttgggttatactggcaaactttaatatatgtatgttatgaatatatgtatatatttatgtcaagtatgtatatacttgtttatgaattcttcatatttggatatgtggtgatgtcttgggttcagcagacattgattttctgctattcggtaagcattgtggaattatgtatgaggttctggtaaatcaaagaaatgttggtggaaaagggtgattcaaaagcagataattaattgagacataatggaaatgatacaatgtggacttggggagttataattcttggtgtgtatctctgggtagcatgttgtgattaaacctgatttgggtggcttggagacttgcttccttcatctccccaccacccccacctagcagaggtcaaagtaacgctcttttctaattatctctttcttttctttttttaatcttcagttatattttgccattcctgatggtttttgttcttctgaatcccattagcctcctagttctctgctctgaaccacagactcccctccctgttatctgggttagattgactgttggttgactgatgactgatggcattgatgtaaaaactgactgtgtggctgatccctgggagactgtatcgtttctttgtctcatactctctttgccttagtgacaaactgcttttaaggtttaatttgtgaacatttcgatgccttcatatgtattttttgctttaaaattggtatcattggatgattctgaattctaaactgagcccccagacactgaaaggaataggaattgggatgtcagagggtggtggggatggacagtagagcagatgttaattgttatacctatgcttctttaacccagactaccttttgagacttctttgtctgttgctgtttctaactagtaatagagctccagactgctttgagcaagctattagacctttaaaatttgtgtgtaagtgattaagtaaatcctaaaattcacattttcatgaccacccatttctgtcttatcaattttctaagaagttttagaaaatattgttgggcaagaaagggaaattacttacctgtgtgattaatcttaaggaaaatttcactctggcatttccttcagatcctatgccagatttcttccggaaacaacgatcacagggggaacaaagaaattctaaaggatttgaatgatggaatgtagagataggatgaaacaaaagagaaattttggtagttaatcagatttatgtatacttgtaatctagaatatctttatactttaaaatatactgtgtaaccttaaaatactaagttaaagtacagctttagctttcattctgactggcctttccttagtactaaaaggtatttacctgctagcttacaagaaagaaaactaccacttacaaggaagaaaactttgatttcaagaaagaaataaaagtctaatttaatattccatcattttcattaatatgtctgaataaaattaagatctgatattgcttttagcaaaagtatggttggtaatctagaaaatgccattgtgtcatattgctgtcattagatgaagtaaatacaaaggattaaatagtacagtgtataatttccttaaacagctagctgaagatatgtggataaagatccttcccctaatgttactgatgtaatctactaacttaaaataatggggattaaatacagcttctgaccttaagaacataccataagaccagattctcagttcttataaaaatgttcagggatttataaattagaatatcaattaaggacagaatttactgaggctgaattcctttcatgattttcacttactctgattgagcgcgtggctgaagagtgtatttgagtgagcatgcacaaagtgtaatgtattttttccacaagaggaaaaatagtttataagttttccagcagaacatattcagccatcctaagaacctacgtcttaagtaaagtcaggttacatcagaaatgaccctctttgtaaacactcagtgaacattcaggctttaagactttaataccttcaaaaagcagttcacacttccacagaattttgtttattctacttagttcaaatgcagattattgatgttggggaaggcagttgaaatcctcttgacattcacccacctattagaaagtaattctgatttggctggaccagaaaggagaatgccattacatagtagaaagtgctgatattctttgctgttattttcttgaaagctattttctggaaggatccatgtatatgtattgattacttttgctggagataaaaagattggttcctactctgaagtggcttacagtctggtagaggaagacagatgaataaataagtgcaataaaacaataacatttattggctctgtaacagaatataggcagtgccttaggcaagtaaaggaaggtgtagggagtggccgtttctacctgtgaaggtcacgaaagcttctcagaaaagtgaccagaacatcaaaaggttagatgggttttttactaagtatgtgcatgtgataggggaactttccagacagagggagcatcatgagtaaagacccagagatgtgaaattttataacatggaggaccatttggggaactacaaacattgcagtgtagcagaagcacaagtttgggaggatactgtgagacatttggctaaagaagcaggagggcaggccgagaagggcatatgtgctttgctaaagcaaccagacttaccctgtaggtgtcgggcagccattggtaggttttggtaacataattaatggctttctgttaatcttaggctagagaaggaagtcctgactttgacctatagactctgcatgatctgattcttctcaagacccatctcctttcgctgtccacgtccgaactacaggatcttctagatttcagctaaaacgtcattcattcattcattaaaatgtcaacagacatttcagttgacctagtcatgctcctctggcataactttaattctgtttgttcaatatcttcattttctcatcacagaaagcaccaaaaatcagcccatgcatttcaacctcccttctgtcctctgttcttgtgtactctgcccccttgtgccttcctcccttcactctcatacccaacaaaacctgtcattgggttgaacttgtcttgactcctccaccccaattcttgtctttgaagtaggacatacaatgtttatattatttactaaaaaaaggatgatgatgaaaaagagcttttttctgaaaacggaattcttctcaagtaagtaatagaatgtagttttctctcttattttcatgttgagaaagtgaagcatgaactatctcagcagcttatatagaatcaagccacaggtactgaattttagctcgtagattcagctgctaaccatggataattgtgtcttcttgaattatatcgtaaaagagctcattgtttttaaattttaaaagaggaggagtatgttactgctttagcattcaaaaggtaaagtcacagagactcaaaattgcttcaagaaacacctggtaattgcaaatgtgtttacaattatttctctactgatggcattatgtttcagaaagtgccattaattgtgatagagtaacacacagctctctttgtgaaatttaagtctattgaatatcagcaccttcaaagacaataaaaattccagcctgcatttatctattcccatgtgaggcgttacgacaatgtatattgtatctttccatgtgaaattctttggcctaatcgcctctcatttatactcagttgtctgaggtcagttttccattttgcagttgtcaaacagctgtcaaattaaaacaccagatcctaaagttaatttactttttgtgtcattccatattagtatattttttgacttcagtatttaaagagttatccacatttcttaatcatcctttccctcagttatcccattttttcctgcaacagttcacacgtacattaagtatggtactctagatatcattattattttgcaagcatagtgtttaaaaattcacatgaactttataaataaacacttgaattaggcattcagccaattaactccagtgttctttttgcaagaagagaaaatcaaatcactttaaacatgtcatccttattttcattgtcatgcttattttcatccttatttttatcatcatttctatcaagttgaaatctcaatagtaattgaacatagaattcgtaattgcattctaaatgtcagtataggttagtataatagtaaaaaaattcagcattcatttttaataattcattgttcaaagaaatatttttgattatgccattgatgttttactacaaagcctcaagttgccagcgggtgacattaacaccgtaatcctctgtgaaagaagtctagcccttaggtgtttgatgaatactttagagttaaataatttggtgaaagacctatagtcatatccatatagaactcttagttgttagatagaaaacacctaaaatgaatattcttaagttatggtaattagggtttacatgtagttgcataaaaatgtccctatattagtttatttaaccttttccactaaggtcattttaatcaatagttgtttgctacttgatttccataaacttgcaagttagatagggcttaatttaatcttttctagaattttgacacattctcctctgagatctcctaactccttgtatatggctctgttatatcatttattaaattgcacttcagtatatttttatgcatctgaatgctccactagcttatgagtcccctcttgctataagggcatattttattcatcttaattcttggtacctgacaggcactcagtgaatggctgctgaataaatgaaggagagcatgggtcaacaaatgagaacataaactcaacaattaaaaggggctaaacacacagtgttactttgtttctttattactgcaaattcatcagatctgtcatttaaaaatgaaactacattttacgatgtacagaggaagatggtcctattgtttgtacacattttcttggaaatgtattagtcattgagcttataataaaacaagttgaattaaaatttgggtaataatcaccagtcagagtggctattattaaaaagacaagaaataacagatgttggagaggatgcagagaaaagggaactcatacactgttggtaggaatgtaaattagcacatctttgtggaaaataatatggagatctctcaaagaactaaaaatagaaaactatcatttgatccagcaatcccactactgggtatctacccaaaggaaaagaaatcaatgtatcaaaaagatacctgcactcatatgtttatcaccgccctaccaccgtagcaaagatatgcaatcaacctaagcgtccatcaatggatgattacataaggaaaatgtggataagaaaatggaatactattcagccattaaaaagaatgaaataatgtcttgtgcagcaacatggaaccagagttcattatattaagtaaaacgagtcagacacagaaagataaatactgcatgttttcatttataagtggaaactaaataatgtgtacacatggccatagaatatgaaatgattcacagtggagattcaaaagggtgacagggtttggaaagggtggatgatgagaaactggaacaatgtaagttattcagttgatgaataccctaagagcccagacttcaccactgtgcaatctatacatgcagtaaaattacatttctaccccatacatttatttttaaaaacatggtatactaagggaagagataaaattaagctaaagttaatggcaatgtaaaagttatttataacagcatagcagttttttttcatataatactaaatgaaattgtgcattaatttcatcttctttgtcatttgaaggcttttaaaagttacccttcattaactggtacatcagtccccgttatcctttctggtgtttcagttacccacagtcaactgagatctgaaaatattaaacggaaaattcaagaaataattcctaagtttaagttgccagccatcctgagtagccattagtgaaaatgtatttcaaagatacattttctcatcagaaatttcattactagaggaaaacacaagctaggagatacagaaactcagactctctctagatctctaaactgccctctcaacagctccgcttagacttacgcaggacaccacaagtttaacacttctacaacttctgatctttcccctcaaacctgctctgacttccatctcagctactgtcaatccaatctgctggttgctcaggccagaaatgctggagtcatcaatgactcctggtttctctcaaaccccacattcatgccatcaggaaattatgctgattgtgtgcatgcatgtacacacacacacacacacacacgtgttagctgtggaagttgtgaggaatgattagaggatggctggattttccagccagttcttacagccttcatgttagcaccaccatcatctcttgccagggttgtaataacctctctatcactattactacttctaccttctccttctacagcatcctcaacacaacatccagagcgatcttctggaaatataaatgagatcatatccctcttctaatcaaaaccttgcagggacttccctggtcctgtgtgaacattgtgccacccacccctaactcctgtttcttcacacactggtcaacacattcttttcatgttatttatcttaaattttgagaaaagtaacatgggcttatgttcaccatgctttaattacaaatatttattcattatttgtatttccctttttgttagttgtcagtattgttctgtcatatcttttgtccattttagcatgaagatattttatttttaaagaacatacaagggctttttttacgttaaaaacattaaccctttgttacaactgtttttctgatcctgtcccttactttgctctttatgtttattttgggttatatggaggctttacatttcaaaatatcaaatctgttgttttgtagtttcttccttgggaaagatcattagaaaggctttacatagtaataggtggattttaaaaaaatgtgtgaggtggtgatttaacttaattcggtcctaaactgttagctggttgttctgggcttatttttaaatgccactcttataatgtgccacattatgctgtattttggatttgtttctgactcattattccgttttcaaaatcacatcctatatctctgaaatgggaaaagttcccttatccccctttcagggcgtgtgacaggggtgtggctcactccttcagtaacctgctgctcaaacccggagggggaacatgcagacaggcaggtgtagagatcatggggagcatttttgggctctgacccaaaatctgacccagcatctagaggtgagtgtttgcagctcctgaaacccaagtgggcatatgttctttctactttgctgtctgcaggcggcttgtgttaatcagctcagttagaccttctgccttatcccaaggacaaagggctttctgtatcccacgttcttgccctagtataccagaaaaattggatcacatgtgggcttggaggatgagtgcaagattttattgggtggtggaggtagctgtcagtgagatggatggggagccagaagggggatggaatgggaaggtggtcgtctcccggagtcaggccgcccacctagctggactctcctctgaccttccctgctgaattcccctcagcgtctgtgttgttctgccattgatgtcctgccagtgtctgctggtgtctgtcggtttgtttttctgcttctcttgacatccagctgcttgtgtctgtgcccgctaggatcttgagtttttatgggcacaggataggtgggcatcgcaggccaaaaggcaacttttggggtgtgaaaacataaatgcctgtcctcatttaggtccatggacacaggcctgagggtagagccctcaccaaggaccctgcccttctctactcagcaattccctgcccccacccatgtcatctctattatttactttaatgtctgagagggcaagtcttcccacagtgcactccttttccaagacttttttagtcttttaatcagtttattgtttcagatgaggttaagaattactttttgaagttctttttaaaaattaggatataattaggactacattgtatctgcctatgtatttgtataaagtatacatctttgcactattttagtcttcgtaaccaaatgtatttcttagactaagaccatttactaacacttgatggcaggagggtggctaacattagacaatgttaaatgtagaaatcaatgtgaagaggaatccatttcagaagtactataatgtaggggagtaaaggcataaaaattttataaaatgctacttttttcctgatcttgtcttatatttcatggtaaagtatatttcaaaaatttagatctgtatctgtttttgaatgttcatttctaggtattcttatctcttagattttttagtttctttaaaatagttccatttctcacccattttctttttatttctataatacctgtagtcagggagctttttttttttcatacaaatatgttgtcatatcttctcttagttcttttaggtattgagagtaaaagacaaatgcttttcaaaacttgcttttgtttttctctagtaggattgtttttttcaaatagacttttcatcacctctcagtattgttttccattttttatgttggggagttttgacagtttcagttgctgttatttccctctgtttattcatcattgaactaagtgaggtacattcagtcgcagtatttgctcatatgcagagtgtgtggtatttactggaatctgtagtatctacagacttgatgttacaggcctcctctctgctcttgtgattgccaataattgacaggcgtatatctcctacctaatgtttatggagagttcatctgctctgaggttacatttcctggtcctacttaagatattttgtgaaaatttgtaatttatgcctttattaaagcaatttattcatgtgttcaacttgtgttcacctgttatgtcttcaactgagcatctgtcactcagcactgaggatacaatggtaggcaaaaaaaacctgccacgatctttgctctcagtggacctattgcctagtgagggatgagaatgtagataataattaaataattataaaccttatttaaaaattataaaattgctttagtgggagctgcaaactgagtgatacctggtactatttgaatttgtaaaagggatggaagtgatgttccggctgaaatcctaaagatgagtaggagttttctaggcaataagacaaggaagagggttctgggcagagtgaataagatgtgcgcaagcccaatgacaagaggaagcgtggtttagaaaaactgagagccctgtgatgagacagagacagaaaggagagtgttgagtgagatgagggtgtagctcagaccatgaatagtcttatagactatgttaagattttcttttattttagttttggagcattaggaaaccattgtcatgctttagagagagacctgatcagatttgttgtttgaaccagactggatatagagagaatgtccaaaaggccttttgccatgctctagacaaaaggtgatgatgctttacactagggtgatggttggggggataaatttaaaagatatttaagagataaaataaatgatatttagaggttgattagcagtggtggaaagagagaaagaagtttttgaggatgactcctagggtgtagcttacaaaattaggtggatagtgatatcactgactacccaaagcggacctaggtttggtggaaggatcataagttcagttttggacatgttgactttgaggtgccctcagtgtagccaagaggagacatcaagtggatagatggatatgtaggtctagaggtcagagtagaggagcatgttgcagatagaaacttaagaatcatctgcatagagatggtaattatagccatggacaccaatgagattaaatgacctaggattagccttgaagagctacataattgaacagcatatggaagaagatgatgttgcagaggacataaagaagaaaaccaaggtatcacagaaacggagggcatatttcaaggaggaaggaagattaatagaatgctgtcataaggtgatgtgaactgaagactggaagagtccattggatatagtgatgaagagaccagtgatgaccttaggaaaagctgctttgttggtctgttggatggggaagccataggcccacagtgagacagaattccagcagatgtcatgcaaatgggataaaaatgaatggtagttccaggagttatgcagcacagtagccatgagaaatcaaattggagagagaaataagtgatgaaacttagacagtgagtacagataattttacacaaaaatgagtgaaaactatatcctctggaatatagtgtcccaagatttgtggaagtttggcttctctaatcagtggctttatatcctaaagcttagatccctagaaatacaggaattatgatgtggagaacctgcatctttgtaacacttagtgttcccatacaggcattggttatgttttccttctccactttctttcctgacattttcatctctttgtcctttgcttctgtaacctgggtgaatgtgtcatgctcattctgcctgtgactaattggcttaagttcctttgggatggattttgttctttagcatttctagtgatttcagttctgaaaatgtatttttaagtttatttgttcataacttccagttctctttttatatcttgtctgcctcagccagatgtatttcatctcacccttgatatcaggctttatgatctgaattttgtgagtaggaagtaatgattttaaaaattgtatatttattcccaggcactttctaaaaaccatggcaaggaaaagataataataaattgaaaaacttaagtcagaagcaaggttaaggctgagggatgcgtatcttaatatcctacgctgttgctgtcatggctgcaacttagtcacttgggcttcaagcaacctaataattaaagtgacaatgaaaatatcatgagttctaacagttgcagtttcctgatggctgtataccacgatggctagggacacagaggtgagccctggctgtcactacttgtagttgtgtgacatggggcaaattacttttctgtttcgatttcttcatctgtaaaatggagacagtaataatagtatctacctgcatcatttgctctcattggagatgggtaagtaagacattatttctactcgcaaaacctagtgggaaatataagatatatacataaataaatgcagtttaatttagaacataaataaagtgatatagaatatcatagaaaaaagattatctctggcttatgtggtggaaagtggtagtgaatgcttgcaaaggcagtggtgcattttagctggagtacacagggtgtgcatgatttgaagatgaggagaggaggattttagtcgaagaaataacctgagcccagagagggaagctgggaagcatacacatgtgcatgtgtgtggtgtggagaggcctagaatgtcagatggcaaaaaggaagtagttggccatacggcttgggtcgtgttgttgagtatcgtaattgcccagctctaaagagttgagattggattctgtaggcagtagggagccattgaagtgggcaaagcctagaggcatgtcgaccagttagggtgttattaccatcgccccagcaactacaggaaacaggaacttggaaatgatggagataatgcagaagaggaaatggatttgggggaaaaaagggccttcattctgagaaagttgatttactttcagctataactttatcagtaaacaaagaggcacttgtttgcctgggtgtcaggcaccactttgtgatcagggtccttatgcttataaaacacacgaggctgcaaaatcttcaatgtgctctggcaatccccgtcaaccaactaaatgagttgatactcaccatctgtaatcttaccagatccttgcttatccacttacagtttatcatcatttgttcagtttaatttttaaaaatagaggaaaccaagggacatttaatacaatcatatatgattctggtgagagatttttttttctgtacttttatttgctattaaatgattttctgtgtggggctgcctgaagtcttggttggtggcagtgactgttgggatgctctgaaggagaaaaatgcccttgtccacctgtaagaagtcctggcagttggcgattggtgccaagatctctgagacttggcctgttcattgccacagaatacttgcaccatctcttagtcatgttaaacacgaggtgactggccagcccattggccaaagtactgttgcttcaataaaccacattaaattaatcttttataattatgcattagccagaaactaactaaatcctacctgtacccaaagaaaccaagataatgtttctccagtgcttgcctttggaggagctgcttctacatggcatccgcccacttcagaaatggtttgagaacagaatccaagccaggtcagcactggaaagagaatagcaccaaagcggatgtgtcagttggatgtggacagggagctaggagtgacaatgatagtataatgccttacatttttagagcactttacagtttacagtgctatttcatgtaccctgtctttgatcttcccacagttctctgaggtatatggaacaggtttcaccacatgagtaaagagtaggaaactgaggcccagcgttaaaatgccttacctcagtaccagagcttaaactacaaattccaatttcttctatcattaaacctgctgctttttctaccagctcatgcagtaaactcttgatttggggaagttattgcttcagaattttaagttgcgtattcacaatctatcatagtgaatctgaagtccaaaatgctaaatctcttctcagcagcattaataactcagtaattttctcaagatcatttgaatagaatggactcacaggcaatattattgatgtgtgagctatgaacattaagacttctttaagaattcagaatttttttccagcgtagataaagtagcctagagcatgatggaaacacatgaaactagtttgtctgattaaaagaaaaagttatacaaatcataaaattaggaaggcagtttgtaatgaaagccattaaatagagaatgtaaatgttatttctgtagtctctttaatgttatgttttaaggtaaataatgtatcccaaagaaactgtgaaatcgattaataaattcactctcctgcagtgttaggcaatgtgagacggagttaaccagggctttctgtggatggagaagcagtctcgtgctcacaagaggtgtggaagggctaccaatatgagaacaacaggtgcatgcaatttatgttcaagagtagtttaagtatctttaatcagtccgttttaagtcaaaccatatgatgttgagacatagacatttttcctttcagtatcaagtatttttttttcctcagtgctccatattagtagtacccagctgtgaaactaggcttgccttttgttacttaaaagcagataaaatgtttacaacagttacagttgattgcatggtggttagtttcacatttctcactcctgtcaaggtgactgtgggtctctaaagaataaatcaggttgcctgactcttgttttctgctcggttcagctataaataggttagttgttgcatcaaatattgcagggtgaccactctgttagacttgacaactcttttttaatgatagaaagaattgcttcatctctaacttggcacaaaatttgtgacttgtaagccaaatagagagatttttacttagagtttattacactttattgccattttatcaaagatagggaagtagaatagttttagggaagcagagccatatcctaagcatattacacagtaagttttttcctaatttccattcgcataaagttaaggggtgaaaaaatcaaattctctaggacaactcagagtaggttattttttcttactctgttcagaatattagagtttgggaatgctgttccagtcccactgtgcttttttggtaaatgtttgttctcacagttcatgttgcacatgtaatttgttaatgggcttcttgataattaagatggtatattcatttcataacagttgattgttaggattacataagaaaggaaaaaagtgacttgccatgttcttgccctcgatggtccggtgcagatacctctgtggagtgttttggggtgaagttcagctaaccgtgctttcctctttcatttctttatctatcataatgtgacatcttccttcccctataagatggacttgtggggactgagtgttttaatgttatgagaatgttcacatgttggatcttacttgtttaatgttaagtcacaaccaggttatgagctatacttgagacaaatgtgctccaattttagaaatcttcccttttgtgtaaaatgtatttcaatctcgttattttttctattgctttactagttttcactttggagtgaaatccaataaaaaatggtcagtaaaatcaagtcacaaattgatttatgagatgctggttgggttcctcccctaaaatgtgaacagtgaaatgtgaacttcatctttaaatgtatttacacaggttgtcactgacgaatgcacattggtaaaataacgacaggaaagtttttatcctgccacatctagttgaaacgtttcatggaggctgtagttttcaatatgcactgaaaatagaaggctctactgctacagctgataggaagcgacagcatgcctgttttgcacaacattgccagcttattgataaaaatgtaagaaaattctacaactctctaaaatggaattttaggttgttatttgtaatgtttacagtgtcaaattcgttctttgttgaattagccttgtattaagggtattgccattaacagggaaacaatttggctattgaaaaataaatttttactttaatactgaaaagcacattgtaaaaatttaaaacatattcagagccagacgatgaaatgcagctcttttgggaggcaaatacatttgagagaggattacaaagggaaatgcctatgagtttaaagaactaaaccaggactcctaccagtgttagtagttgaggcatgtgtgtattcatctttattgtatgttctcagagaggacttcacggctaatgttctgggtagtagatggcatccaattcactttcggtttttaaaatacatgtcaatacttaagtagggtagacagcagcactaatcatattaagcacagtgtctgaactcacagtgaatgcataattaatgtattgttttagaggacctaatatattagtcaagggcaagagcttcatgcataacttgttctgtgggtgaggaggagaactattccacggtgctgtttgtaccaccgcagctaactctgctcactaaatctattttgttacacctctattaggagccaaagccatcagacaacctccattaaagtgtttgccacggagaactctctctgggatagtaaatgctaattcagtgtcaattagaaaaatgcttctaacaaaacactacgattaataaggggtacttgtgttgattcattgctgggtttttttttctttttctaattccttataaggatgcatctttcattactttctatttattattttaaatatgtttagcttgaaggcactttgccatttcatctttattttaaaatgtatccaaatgtttacttctccatcaatatccatttaaacttaggccattagggtctcactaatttaaattcctttagccaatccattgaataaaaggttccgtataaactcttgaattactgcattcaaacacactttttaaagtttctgatttctataatcctcttcttagttttgaagatgtataacgtatattttaaaaataaattcagttttaataaacatcctgtgaccacagctaattaacaactgaaaactaaaactcttttctctttgcagtgttctgactttatatagtagatgtgttcaaattttagtatggtattctgtagttttatgcatatacattttttaagctgcctaattgaactgtgtgtgttttatggtgacagtggtcacagttttgttcctcttattattttgataaaattcatcttttgttcagctccttgatattagggtgttggtggcaggggatgtctgctgggtgggaggatgcaatggagtatagcatgagggggagaatttgctaaatgtccctttgataacttggtgttttatttaactctttcaagctcctgaattattaatatctctctttttttgctttatataatgttttattagtatttaaaatttatggggaaatatttactttaaatattaatcagtatgagcattactgaaatatgctaaatcttattgatttggtctctgatttgtttttaactttagaaaaaaatagatagtgactcgaattcatgtttccttgagtaataaatagaatcacgaatttggtgcaaatgactgtcctaaatcttcatattttaatctttgaactataaacttgaaataaaatagtttaatttgaccaaaactgtgttataacttttgaattagctctggattattaaaagagagttaattttaaggaaaggcataaagaaacttgttttaactatttgctgtcttcactaaaccaacctttctactgtagatgtatatttttaaaaaattgatgttttgaatagattattgttagaagaatacttttcctctgtctgttttcctggtgtgctaccagtaaataaagttataacattgagacattctgatagagttcgagacagctcaactataagcttatttcagctgtttattatttttactccattacctcagttttttcatatatttacatactgagtgcagggaaggagagataaagtatattctgatgtaaaatcttcttaatgattataaataaaaataagccagtcagtttaaatattttgtacctataggaattttttaaatcacatacaaaaattcaagtgcagttaatgcattctatttataatattcatgtagatcaaagcaaagaatcaatattgcactagtgatttctattaaataaaaattatatacgtgtgtgaatgtgctgcattgagaatgtatgcattggccttgtgtttaaaatattaatattgttactctgtctttttgtatttaaaaattaaaagtaatattctttgcctacttagatgtccttttattaattacatgctactgagaagctattattttgccctcaagtaccaaaatagtacttggccacatcaaagttagcaccacctttagaagtgtttttaatttttttcaaaagttgcatttttaatagtaatttgaatctttaagagtgtgtgtatgtgtgtgtgtgtgtgtgtgtgtgtgtgtgtgtgtgtggtttttaaattacagcattgaacttagaaggcctgcctagccagtacctcaaatttgttgcagatgctgcatataaatctgatttatctttttttttaagtctagacgttttatgtttaattttactccttttagtacctctaatactaataagaaaatttcactgaactgaattcttagtaaaagaaaaagatgtgaaaaatgaacctccaaaagcttatacatgaaaggattatataattatttcatttgtatctactttattatttcatattaatctattttaatgatgcaattttgagcatttgcattttcagcagcagtttttttttagtttgtcgtatacttatgagattaaaatgttagctgtgaacattagaaacaatgcttatttgacaagaagctctccctgaagccatcaataaaaaatactaaatatcagatatgtatttcattcagttatgacttaattatattacctgtgttctttttattctattttatatttccagacagaaagtaactattctcaaatattcatttagtcataataaacaattaacatttagtagcttagggtgcaaattatccagaattctcctgatagggtgtgcatatagtagggattccataggttttttacacacatgaatcctcataaaaatgctttcaccaaaaatatttagataattaaataaaaaggacactggaagaagggagcagggtgcttaagaaggagaacttaagtacattatggatggatttatgattgtacagctggactgagttacagcaggactatagaacctaaacaaaggcggtcaactttaagaagagcatatctcaaggcacgtttcaaaaatctgtatttctacatttattttatttattttttttgagacagagtcttgctctgtcgcgcccaggcgagagtgcagtggcgcgatctcggcccactgcaacctctgcctcctgggttcaagtgattctcatgcctcagccccccagtacctggtattacaggcaagcgtcacacactgggctaatttttgtatttttagtagagacaagggtttcaccatattggccaggctggtcttgaacttccgacctgaggtggttggcccgccttggcctcccaaagtgctgggattacaggcgtgagccactgtgcccggcctatttttttttttttttttaaacactggttttgcattagtaaaaaaaaatcttcctttttagatttcaggtactgctagatatattgtgtttaaattttagttcacagaaatgaaatttattctctttactgaaataacactttatatttcaaaatatataaatatgtaaatgtatataaataatgtaatataataaatgtgtataaataatgtaacctttcctcagctcatgagtcccttgccactaagaactatttactcaagttctcagtttgtcctccctaaactcccttgtttgatttctagttagacacattctgtctgaatcagttaaaacttcccgtagtatttatgtcttttgtaatctttaccaggatctgattcttctgtagcagagctatttttatttaggcttatatggataaatcaactctttcagccttctgtatttttctttgctttgactgtttcattaaggccccttgagaaaactccccataattatttttttcattgtgctgtaagcattgtaaaccatgtgttcctttagcaaaagacgtgaagatgcaggctgtttgtgcctaacaaaaacagacctctttaccttgaaaaaccaactttagcagagctatgctagaaaaggataggaggactctctgggtacagtagggttatatagggttggtggttttgtttttacctattgaggaatcagattgcaagcccatttcttttcttcagcctgtgcatcagcctgtctaggaaactctacggtcacaatactaagaaatccacataaattagttcatgaggcttcttaatcccaggtggatatacctatgagccctgtgtatattctttcctttcttctcttcctgggagaatgtagtgaaggtgctgaagccacccagtgccagcctggagtttcaacaaaaattaagaatgtaaaaatcctttggacataagtgaggagtttctgctcccaattacattacactggggaagtaattatcttagaggtgattgtattctgcctccctcagaataattcctccctttctaggaaaatattcctcccatttttgtgcatattttttacaactaaaggcactggatatgtgttgttcttaggtaatttcacctctttaagataaaatctgagtaatgtctatcaatgattacaagatttgaagcccatcactgcctctgatgtgcaatttcataggcaattaaaaattccccgggacttctgatagagttacttgtaataggtattacaaataatacatataataatgtattgcttaaggtcaaagtttgaaacaggcctagaatcaaattctagctctacttattaggtgtttggcttatgtaattccatcatctatttaaactcagctctttcatatgtaaactgaggcctgtaccatctacccttataggattttttttctaagagttaaagtaaatctgttaatttttaaattttcttttttgttacgttcttcaccactgtctttgtttcttggctgttttctttgccagcctgattgtcttcatcatatgcatttccatggccatcttcctcattgtcgtcttcatctttgtggtttgttgtctctcctttgcttttgtttcctcctgatttttctgttccccacctttttcttctcctttgctcttcttcactaaatagtctcgtcatctcctgtagagccctttcaagaaccttcccaggacctgtgattcttcaaacactgtttgaaaacccatgatttagtctgtgtgaaaaaccatcacaaagtaggtctttggttgtgccttcactaagtattagcttcccaggataaggcacctagttcaccactattcctagcagcatgtcatagtggcttagtaaaattcttcacatgtaaaagattgaatttttattgtgaagtgtaatttggatatatttaagttatttaaatgaatgaccagctcattgatttgtagacatcataaaagggcagcttattgaagaggaagtcaaagggctttcctaagcagttactgtaatttagaagaataatcagaaagcaggttaagaaaagccaaaaggagattgtttaaatatatttggatgcattcattgaagacaatacgctacaacagatgatgaggtagttctatctgtatatatacatatttttttaatacacatgatgtttataaagttaagtgagaaggcatgctagaaggcagtatatatgaaaatatagatcaaaatactaatttttcatatatgagtatcagtactctagcttatttttttattttttatttatttttctataagaaatgaattttctctcattcattccagtcctggctttttgtagtgaaatagttttagataactgaatatgactggatggtcacattatgccataaaatacactgggtgaagcacatagagcaggtcaagaaataaaacatttcattttaaatgttctgatgacaataatttagaaaacagtattagaaaatattacaggacacattttccccttcaaataaatcattctcctgcagcctgtattgttgccatgtaataatagcaaattcaaaggagtttcatgagactgagacagtcactgtaagaaagaacgttggggtactgacatacacatgcctggaaaggaattgtgtaggagattctgaagcctaaatcagtagctttgtacaaagtccttttcacttaggagatcttctgactaaaaaaactgggaaattaaattataaagtgatgcaaaagtaggttgtttatgggatgatttcctacttactagaagtttctttaaatatgtacattgttgtcatatatatcttcctttaaaaatactttcatttgcttttgtttgggtttatttttcataatattcttatatcctatgttagagttttaatcatgaaccaaatgccacctcattcttcatccaaacatcatgaaatcattgcagatgaggtgaggagataaagtaattggattagaaatggatggtttaagtttacaccattttattatatcaggaatttttgatatttgagatgtagctttccacagctgtgtgatcacttgtgcctaacatacgtatatgataccaggttctgtaattttgttgttttaaattctgacggagaatccgtgtcgatggtcaaatctatcacttagaaaagttttatctgaagtaaaactactgatatctcaattgagacagcacgaaggtatgatccttgtattactaaatatttcttcccttgattttctgctttatatcactttgcatttataagccctttaccgaatggtggtggctgtgtgtgagcataataatttgtatttttaaattttttatccataatattttcctaatcttaaaaaattaaattttatatattttattcagtcttacaaatatattgttctaccttagaatatttttatgaagtgttaaattttccagaggatatattcatagtttaacctctaacctgttaaattatttgagaagaagaaaaaagacatgtttgtagcattatgaaatgtctgtttcaaagaatacccctgcttattttttacttttcctatgtttattctgatgcaaaattatagcttcaaatacttattttctgtttaaaaataattaaatattaaggaaaaattatgcaatatgactacagaaatttattaataatctaataatgttgaaagagctatgtaattagaactttaaccattcttattttcagttcattttagatttattttctaaaagaaacagtacaactcaatcaatttggaaattttgttgagatttttaacttaaaagcttgtaacatggtaacacttacagcttgtttagaaatgtgtggtgtttgtgaagttctttacaaaggaaccaggtaaatcttggcttaatgttgatttgataaaattccctaaaatttccctcaaatgtattaaaaataagccaagtttattaaaaataagtcaactgtgattgtattttctttaataatcaaaagtattgaagaagtacctatttacatctaaacatgaaaattgttataaaatgttttcatgagtcatacaataaaggaagctttgagagaacctggttatccattaatctttattacaccaatttggactaactggatttgtaaaaagttcaaattatgaaatagttttgaagaaatataatactattaatttttaaattaaattaggataattaagtttttgaagagtttcttgttaaaagtaatctgagttgtgggtattatgtctatttttgcatgacccatagtagctaatagtgttataaattaattaacaaacatgatttgtaattatactcagtgtaatataaaacatttaataaatatacttaaaggtacttaaacagttggttatcaagcatttaaaatgcctgccatcactaccaacaccacatgttattaaaactatgaaatggcactacatggaataaaagagtttgctagatgttaatcactttcatccagatttcagtctggatgatgaaaaaaatgactaataatatctaaattcatgagattttatcataattgcagataagaaattttctttaaaatagtgtttaattcagatttttatgagtttcagtgtagtcttaattagtgagattttagtcagcttgtcttactttatagggcataagtgagattatatgttttcatatggaagtcttttctttttttaaaatttgtttaatataatagatgatggatgacttttactaagaggaaccctggtattcgtaatggttatttgagtcagtgtttctgaactcttttggttcttctttgctttggtgttaaataattccttttcatactgtaaatgttagtaatattttttagttacttatactttaaaggcttcataaggtagactccatgatgccctcaaattcaacaaatgttaatgcctgaaggaaaaaggaatgattctttgtagttgattatatatagatctttagagaacatatatttttaggttttatctacttgtactcatgacctttaggaatattattaatcatatgcatacatgcttgttaaaaagtattcttaaagaatgtgaagagataaaaaatacaaagttatcttttctatcagcttttttttcaatcatcaagaaatccagtaaacaacatatatgttagaaaatgtttgttttctggaaaaaattaactgagttcttacaagtattttaatggttgttcacattgggagatgaaaagcatccgcctttgtcagatagtgtttcagagcacagaataactctgtaagatgcctaattttgctttgtatgtgggacacagatgttttcacctccaaaaagggacagcaagcacataaaaggagatcaaacttgttcccaaagaatatgtgtggtgtaacacactcttggagaggatttcaaaagtaattagctgagtaagctaaaaaacagcactgctatttaactttaatagcagaaagtgtgccttttaaggtagtagttttttgactagacatggataaattaattgccctcggtgtttttttttttttaagttaaactctttatttagagatcttcatagattcacatgcagttgtaagaaataatatagagagattgcatgtagcctttacctactttcccacactggtaacgttgcagaactgtatagtacaatattacaagcaggatgttgactttttgttttaaaaatgttttttgagtctgtctaaatggccaaagcatagcactattttttcttttattctgaataaaagacaacagtatataacgatgcatataaaaattatcttaaaaattagcctaataaatatatgatgagatgtctgttctagtgtaggcatgaagcttcatactatatagagctgttcatatttgaataggtaaaacatttagaaattttatatagtattctctttgcttcttatgtagtttatttgttctaatgaaatattttattttaatctttttctttatctgggtattatacagatgttgttaagttgaaatctttgaataattttggtaaccaatattttaattataaaatttctttggaactaatatagctattttgttatgaatgaaaatgtgtttattattagtttagcaagcatattactgattttagatattaggttggtagttctcaaattttaccgtgtataaagaatcacctggggagctgattgaaaatgcagatgcttgtctccactcccggatattctactttgggtcagaagtgagacccagggatctgcatttataattaaggactgcagaagattttgatgcagatgaaccctgaactgcactttgagaaacacttaatattgaggttttttagcattgtattgtagaagcaatagagtgttgattttgtactctaaatgtgtataaagaacatcgttttgttttccaaaaataaatttttattcaaatatggaattactgttttttcatagtcttcctacgtaacctattggaatttttagatttcaacattgcaattcagtaatacctgtgctctgcaattgaaatctttttcaaattcatggccagcaactcaggaaaagtaaaggcatttgagtagcaaagaaaagagcttggaatacaagttgagagccaccaaaaagtgctctgtcaatagttgtgtttcatcaaataagttgtttggattttgttttcttcaggcatttttaattttccttttaaataatgacaaaagaaattaaaaatagtaagttggggattagagacgaagatagagaggaagagaacattggcatcaaacaaaacaaagaaaatgtaaaggtgattgattttaagaagctaaggagtttgagcaatctaatgtgacagcaagtacactgagtcattcattgggaaagagatgaaataatattcagtaaattgttttgaaggctcagaaatacgagaaattttagaaatatttccatcaaaactggtttcaatttcattaatatttgggtatgcaaacaagaaaattacttcattaatctagaaaattcatttgtatgcaacatcttatttcccagagatgacataaaaatgaagtgtgacttattcatttgagttttgagtaacaggcatccttctaaggaaaagctaagtaattatacatacctttttttagacttttttctttctattagcaaaacaaagcctagatgtgctttccattcatttccagtttgctcagactgacatttggcttgtgtgggacatactgatgtttcaggaaatttcttgccataaagcacggctgagactttggccgtttgaatcctgtacttatttgtttctttggtatgtacatttcaaaacttttagtgaatctctgacctcaaaatacatttttatggcaggtttttttttaaatcatcttatttataaggttagcagaacaagaacttcagcttgcctcccaatgttagcaattaattatagtgaagatgacaaagatggacatgtatggttttagtctgttcataaagatatttgcatgtgataattgcctcctctaaaatcaacactttattaaatctttagattttttcataaagtaaaagctatagtgtttagtttccatttgacattgaaatctttttggttatttgtcagtttatatttttcattaaaacttcaagtttacttagactgtcctaacaatttttttgtgtgtgtttcttttttaaaatcagtgagaaggccaagtctgtgtgaggtggtgaggaatttaatgggtaaagatgtttttaggtggtgtgtttttttaattgttttaccaagagttggtgaggatgctagaaggcaggccttcttctcactgttggtgaaactaaattgggagtgcctttctgaagggaaattttagaagtataatttaaaattcttaaaaacatgttttcttcaacccagtaattccatttctagaagtttttttctaaattatcaaaatatgtgcaaatatatttatatattataaacatattaaatattatttcaatatagaaaaagtggtctcagtaaattgttttattcatataatgtaacactatataatatcatagaaattgcatttccagatgatatttaatgacatggaaagtttttgagtcttaaatgagaaactattagaatataatagtgtgtacagtatgtgtatgagtgattggatcaaaaaatatttatactttttaacccagtcattctttttttagaaattaacatatcctaagtgaaagtaaatacttacatctctttttaaaatgctgatcagaggtaggagaataaaaataattcttcccatgtgggttattatatatttaatgctttcatacacaaaattttaagaatagtgttgttaaaagagtgtgattaggatttccgactcatatataggctttaacaactatctaatacaaatccctttaaaaatagtaaactaataaatggtagaaaaataaatagtattaaggtagactagaaagggtaccagttattgaatgcattttctatgtctagattagtcttcatgtccttcaacactttgcctgtgttcctggtttttctttccatgcagattaggtcattattcagatagagttttgtgattctgtcagagctcttaattccaaaatgttcttacgtggcagacacaattcagtttttttttttttttttttttaccatatttctacaacctagcaatcttactacactaaaatcaaccaaatttcttactctgattctgattctttgaaatatttcataatgtggtcgtcattaaagggacacacatgaataaaatttccttacaaagggaatagtgtcactcagctataatatattggcttgtagctcttgatcagttcttttcaataatacacacatgcacaaatagacaccatactgtatatgacatgtcagaatctgatattttctcttaatatcaaatcatggactttccaggtcattaaatattatttgtttttaaggggcttttagaatattgtgtattgtgccattttacagataagccaaactttacattaacttagcccacattgtcagacattgaaactgtatctggtacattataagcaattccactaaagataaacatgctggttgtccttgttgaaaagaacaaaatcattttaaatgttttctccatagtatcctcctaatggcaaccactgtattggtagccagagtaatgtttttttaagtttccattttatattgtgaagggtcagccctaccggttcttgagtgctagctatataagtaaacatagatttctgtgaaaagtgctcaggtgtcctgtaccccagtgcctggtgggccacattttggacgtatggtattcagactcataatcggtcctttctctaaacttataattagcagttataatttgcatttctatagatcttactgtactgcctcctattattttataaacaagtgtcttatctcttgagctggaccctgagctgaagccaaggtctttgtcttacactgcctgattgtctcctcatcccagcattgtctcttgctcaagtgtagtgtgctgtgtggggtattcggtagtgatgaagcaacggagtgctgtgtggtgtattcagtagtgacgaagcaacggagactcaagacagactgcctgggatcatatccaagcagtacgacctcgatcatttactttatttgtctgggcctcagtttcctcatctttaaaatgatgataatgataatgcctcctgattagggttacagtgaggattacatgaaataatacacaaaagaacttagcccaggcttggtaatagtaagcccttagtaaatagtaactaatggtagtaaattgttcttgatttttataaaaagtaagttggtgcattgctctagtcttttttttatcaatataaaaaaggcactggtgttcaatattttgcatgtctgttatagtcatccagttactaaactagctatagattttcacctgctttaataaaattatgaatgattatcatgagaggctaacacattaattaacgctcataatattagccagtatctgtctaatgaattgtttatttatagcaaatttgctggtggacttagagcaaatgtactgccttaatcactaaactaaacccatagctgagaatatatactacttttcaagtagaaagctgacaaaaataaaggttttataattttattattgaaattttcgtaagaaagtttcacatgaaataacctagctacacctttcctatgcctaaataagtaaacgggatttcttggcaataaaataaataggtataaaagttgcatagtgattgcgagcttaggtgtttcattcataaccatcactgtattaagaggaaaaaatacaggtgggcatatttgaagccttatacttggaaggatccctgtgttgactccagtatttagtatccaaaattgtttcagcttgcagtgtttgatgattgcctgtcttgctgtactagatgtctgtaacttcttggaaaaattagaatgtgctataatagtagtaaaaataaaacaaaaattctgagcaatgtaggcctggagaactgcagctatccataaacaaagccatagaaaatgtcattctgaaaagcactcaacagtaaagaaaccttttctgatagggcttctcttgtaagtctatttgaattgccatctttacaaggaactttcttcctcaaactaaccttcaaaagagtttgtgatgaaaattttacattcccaatgtgttttggaaagcatgaaagatttaatgtggtttggaaaatgtaatgtaacattcaattttaaaaaatatttcccaaccatgtgcaaatctttttgaaagcatgtagccacatctatctatacttattatttgtttatgattcatctcctttttattttaataagatttttttgacaagagaacaaaaaactatagacctaccactctgaaacaaataataaactgtaaattatattagtattttaggcattcttccagattatttcagagtaatcttagttaacatttttaatgactgcctcatattctatcaagttgtttaccacattttaatcattcctttagtatttcttccaatcatacctgttaacaactacagtagatactttttatggttggcatgtagttttctcctctatttctgtatgtatttccttaatatgtagtttcagaagtggaatttattagagataaactaaactcattaaatttagagtttcttattgtctttcatgagaacatttttccttttcattcataaatgatattgaaacactatattcttactttcatattcctgtttatatttttgtttttcatgttaaacattttacattctaatagtaacctcatcgacctgttaaaaggcaatataagatttagattattaaatagcatgtaatatatgtgatcagtaatcttcaatgagcttgttcttcatttaattgcaacgttatgtctgattttttttgttgcaaagctttcagaatcttgacttgtggtaatcttcttttaaaaaagcttttaacagaattaataagtcatcacgttatgataaatgattaaggaaatgatgcctctaatacattgaattattaaaactatcattttgaaaaattatattggtacaaactagtgtctactgctattactcatacatttcagaattcatacatggatatcgtctaggattttttttttgcgtaatcatgagttacggtgttaaagttatagtgttaatttaattatgttatagtgttaatttatctgttttacatctcacttttgtatctgaaaccgttcgaaaataattattattaaaggccagttgacaaaatttccactcctcctccccagtgtgactttccttatttgtattatacctataaagactacctcttacatcggccaggcacagtggctcacgtctgtcatcccagcactttgggaggacgaggtgggcagattgcctgagctcaggagttggagaccagcctgggtaatatagtgagatcctgtctctacaaaatatacaaaattagctaggcgtgcctgtagtcccagctacttgggaggctgaggtggtaggatggcatagagtccaggaggcagaggttgcagtgagctgagatggtgccactgcactccagcctcagtgtcagagccagtccctgtctcaaaaaaaaaaaaaaaaaaaaaaaaagaagactaccttttataagaattaggagtatttcagtctattctcattgtggaataaaagtcactgtaaactggataggctaaaatacatgtagtaagtctcagatgatttagcattacagacttttttttgtaaagacatttattatctaacattgttttatataattgcagatttcattatatttaaagagtccatttaccttttcatttgttatgaattctgttgttgtggtaatgattgttgtttaatgtttcatcttgccacatataatttagaatttcactgcctcgcataagagtagcagtatatgatctggaagattttttaaatatagaattgtactaaatagagaattgtggtccatatgacatttctaaagtaaaatctctgattggaaatgtactcacataagttttaaaatgtcttttctgtcttgaagtgttgttcaaaatttctccgggatcaggttttcatcatgattttaacatcgtcattgcttatgtcaagcccacctgcactgttgtcactcaaataaggagtaagcgcctctttattagaaaacctgccctcccactagccagaaactagtattcaagactcaaatctagttagtaaaattaaaaccttttctttttggaagtattttactaagacattaacactcttcctttaactcatatttgtcagaaaactagatgctactttacacagatagttgtgcagacacggaaaaatcatatgtatttctggattttaagaattgtgtctgagacagaaaactgtgacacaggcagacagccgataaatacataatctattgtaattctcttaatattgggatttaatgaccaaatgccatttatctaaagctgcataattatgctaataaaatcatagtcacacatcaactactgttatttatgagcatttaaaaatatttgcctgctttctgagttaaattggtatttggcagaagagttagaaataaattccctttatgccatttttaactaattctttttttccttaaaaataaagcaccattgaaagactcaaaatgaaccattgaactctattatatcttttctttattggaaactcttaataatttggaatttctatctatgtatagaaaagcaaacatttcttcccagtttgctattaaaaagagaactgaaaatattttgtgtgtatatcaaatcttttcttccatagatggaccacattgttatctttttcattctttatggtggtaagatcatgtattactctttcaggacatggtgactgtgcttgcaacacattacaggtttttgtttggcctctcaggaaagaagctatgtacttcagtttttcagggttctggggaattacccaatatcctatccactgtgcatgacaaatgtcttaccctgctataagaattttcagcctttttacatctttcagcaaaggaactctaggtccctctatcatgtggatggtccaactctaccattagatataaaggcattgccagtaatcaggttgaaagaaaagctaggaacagttgtaaaaagctgtcaggagtattcaaattaacaactgtcttatagatgcatatttcccgtgttgtcttcttaagacctctttgaaaatgtcccagtgtatttcgggtactgattttatcctttaatgcaaataccattatttactatttattattattttaataggatagtcattgttttcatttatcattccaatttcttccattgaaatgtataaagaagcacattttgttatgtatttgcttgaaaacatatactctttaaacatgaagatttttaagttactttaaaatacatttatggaattgataagaaagtctttcaggattgtggagaaaatgggcagtagagcaattttacctaagctgaaatgcactataattgcttgtactcccaacacagcatctcagagatggaacaaacagagtcgttaaagagaggtttcaagtcgctttgcttaggtaatatagtagaaagctattatctcctctctgaccaaatcacttctcttgtcatttgggtaggatctgaagttcaaaaacaaactgtaatcttagaggaaacgtgtaaatctttcagggtgttattgaacattttcaacacgttgaacattatcaaaagcatatgcaactgtcttttaaaggtgtactctgtgttctctgataggcaaaatggatgagacgtattttctccctattgcccctggtttccccctttctgtttccctccttccctttctctctgttgtatagagtcttgcttttgctgatgattaagccaacaggtgtcaggagtgctaaagcaagttggctttgtgcccacaagcgtacagtgcagatactgtgtcactgtaggttttggtgaattgttgtgtccttccaagagaagggataacccagctgaaatactgcaactcctgagggattaatgtgtttcctttgctttatagttcagaattttacagtttctttgtttgggagttctcgggttgcttaatgatttctctggcctccacccccaccgtgttgtgaccagatgtatattataactgtgtttggacctctgtagatttgccaattttattgattagtatgtggtataaccttttctttttgagtacatcatttttctgcagtaaatgttcatgttctgtttgttttttgtttgtttgtttttaaatgatggcattttcgactctgtagtattttagagaatggattccagggtcatactgttgtcacattattttctccttgttaatgttgtcagtaagcatgcctattttgtattataattgtgaggggatctgcaaggatttattaactatgaaagtcttgtattcatattagattgtggtgaaggagcactagtggatgaaaaattttctgatcttttaagtcctagtttgaaaggtgtttggttttcttttaattttgcaacctaaatagtctgttaacgttagaagtttttagtgagctttaatacatttatttattgttcttgaaaactggccttaagaatgaacagtttttaaaacagtttttgcaaagatggaattgtagccgttggcagctgttagagtagaaattcctttgagcttatttggagattttagaaagagcttaactccaccctggatacccccgttaactaaatatgctggctacgatgtgagctcaaagttttcttttctttttcttttttttctttttctctctcccaaatgctaaccttgtgctaaaatcaaataatgatgctgtgagatttgtggaatttgggagaggggttgggatggggcaaaactgagcacagttaggtacaaatgggaataatacagttagaagacaacaggctaaacgtgctatacagacaagggtaattgatggaataaatttcctagaaagtggaaggggacaggattaccagtccttaggtaatcctaaagttaggagagaagaggctgtacacactggtagggatgatagtaggaaaaggagggagtgtcctgtttgaggacttcagtgttcaataaagtagaaggctgtgccctgtattataggtgtgtgtggaggggcagggaggggtgggtgggggcgctgtgtagaaacatcagattcttgagagtggaccagatatgaaatccttgtggagagaagcagattgagttgactagagagcacatttgaagtttgtggttgtgtacttgtaatgaatcctcttgtcctataaggtgtctttttccagcatagctccactgcttaggcacatgcacagagaaaagtagaatattagggcaaaaactaataagccctgtgtagttgtagatgtggtttcaatgctgtgatgggtcttgacagccatggggtagagtgagtgaagacctgaaagcatgttttccttgagaaaccgaaggtagctcagaatgcttagagtacagcatgaaagaggtaaagaacaagaaagaaaagagcctagagaggtaaaaggaggcaagagctgttatgaagagctttgtaagccgtgttagagcatttaactttattccttggacagtggacagccatggaagggttttatgctagaaagtaacatgataagatttgcatctgacaagatcacttcgactattctgtgaaaagttactaggggaggatcaatactggaggtaggggaagtagtcagggggctgttgtaatctaggcaaaataaaatagcctgaattaaggaagtggcactgatgataggaataaaaaatgggtgtatttgagaaatattttggatcaacattttgccttcctccgactttctggagaaaagaaagtttctaattgactaaggctccgttaatgttggttttatattacctcactttagtaatactttattagtttacctaaagagggtctgccatattttgtatcattttggtagaatttttttattatctttttttcctgactagaaaatacatggtcttatgacattcttcatagaaatggaaaaaactatcttaaaatttatatggaaccacaaaagacccaggatagccaaagatgtcctaagcaaaaagaacaaaactagaggaatcacattacctgaccaaattatagtaaccaaagagctatagtatacaaagctatagtatagagctatagtaaccaaaacagcatggtactgacataaaaatagacacgtaaaccaatggaacagaatagagaacccagaaacaaactcacacacctacaatgaacttatttttagcaaaggtgccaagaacatacactggggaaaagactatctcttcaataaatggtgcagggaaaactgggtatttatattcagaagaatgaaactagacccctatctcttgccataaacaaaaatcaaatcaaaatggattaaagacttaaatctaagacctcaaactagtacaagaaaatattggtgaaactctctaagacatcggcctgggcaaagatttcttgagtaataccccacaaacacaggcaaccagagcagacatggacaaatgggatcacatcaagttaaaaagcttcttcacaggaaaggaaatcatcaacaaagtgaagagacaacccacagaatgggagaaaatatttgcaaactacccatctgacaagggattaataaccagaatgtatagggagctcaaacaactctctataggaaaaacaatctaataatctgatttttaaatgggcaaaagatttgaatagacatttctcaaaagaagacatacaaatggcagacaggcatatgagaagatgctcaacatcatcgattatcagagaaatgcaaatcaaaactacaatgagatatcatctcaccccagttaaaatggcttgtatccaaaggcaggcaataacaaatgctggcaaggatgtggagaaaagggaatcctcgtacactgttagtgggaatgtgaattattagtagacccaatatggagaacagtttggaggttcctcaaaaaactaacaatagagctgccatatgatccagcacttccactgctaggtatatacccaaaagaaaggaaatcagtatatggaagagatatctacactcccatgtttgttgcagctctgttcataatagtcaagatttggaagcaaactaaatgtctatcagcagataaatggataaagaaaatgtggtacttatacacagtggagtactattccaccattaaaaaggatgagattccatcatttgcagcaacatggatggaactggaaatcattatgttaggtgaaataagccaggcacagaaaaacaaacattgcgtattctcacttatgtataggatctaaaaaccaaaacaatggagcccatggagatagagagtagaaggacggttaccagaggctgggaagggtagtggggtggtggggatggttaatggtacaaaaaaataggatgaatgaataagacctagtatttgatagtacagcagagtgactatagtcaataataatttaattgtacattttaataactaatagagtataactgaattgtttgtaacacaaaagataagtgtttgaggggatggataccccattttccatgatgtgactattatacattgcatgacggtatcagaatatctcatgtaccccatgtacctactacgtacctataaaaattaaaacaatttaaaaaaaatttttaagaaaacacagggtctttatagacagttgaaaattacaaaaaggtaaagcatagtaaatcagcttccctctcactatccagagacaaggattgtaaatattttgatgttttctccttccatcttttttcagaaagcattgcttgcaaactgagatctctctggaaggaaaaaggggtcagttccatacagtgattcttggagctagtaaaaaccagtttaagtttctgagtgttttacttgtaggatgtggtactttgcctctgataagtgctaggtgaccttttagatcctttattttctcctttaaggatgaagccttaaaatccagcctagtgagagagggcctgagtaatctgtttagaggagaacattgccccagtcaccacattgggtgaaaagccacttctgatgaatgccagagcacacacattcattatttcaaatgcctcatgggggaaaatcaatgggaaggagtcttacttagtttgtttattctaggtaaggcaacagagaattggtaaccagagagtaatggctgactgggtgtctttactgatttgtaagctgaaagtaatggcacatggaatcctgctggataaggtgcctctccctgtgctttattttttttgtttttaacatcccttttaacttggtctgagattgatcgagacattgtcttgaaccctggaagctgtgagccatattggaatgacaaacacttgttgacagcgttgagaagatggatggaaaaacaaactcccacgaggttcacatgtttgttttcctgttgactctctagaagaatgttgtgaccattatttaatgtaggggaagaaaaagttattgtcaaattcagtattttctgagcctaacttacagacatctctagaatacatctgccttttgcataggatgtaattaatcaaagtaggactaggaagtacatcagttgggctgtggtatttctatccatttttgttatctgtgtcattttggctcacagagttcaatagtatcataagtatatattgtctgttaggaagattaataagtgtattttgtatctgagcattaactatttggataatatataattagaattaatataatatattttaatatattactaggtaattatatatactatattaaaatataacgttatattttataatataaaatgtattgttagtctataacatatataacaatatatttataatatattaaaattaatattcactaacataaaaatatgtataataaggaagcacaaacgttataataggtgtctaatagatatttatccattggtataatcatgccctagatttttgtcatgtgagtatgaggagaaaaagaaagatccatttactactctgttaaatagaactgttcattgattcccaaaccaattatgagacaaagattaatataaatacttactatgtttatatcaattagtgcccttcagatacttaaactaggaataccctttctactctaggcaagtaattttgtaggtatgatgtatatgaaatgaaatgatttgaagtggttagctttacagtgtattataaataatttaactgcacctgtctactgagcatcttctcacttttttgtaataaaattttcctttgctatggagaaaatagtatatgtgttttagcggcgatactgtgtctttgtgtctctctaccagcaccctccccgtgctcacaggatagtcacctcattccttggccatgatgattcatggccgtgatggttctggacttttctcttggagctaagcagaaataaactagtttttagggtggctaggagtgtggaaggcagggactgctgttgtcattttgcctgcttcatggaaaaagtctgcatgcaggaataaaccaagccaatttaagagatgggaggagccggtgtcatgatggcatcatttgaaattctgaatcttgtccttcctgaaagcaggtacaaccctgttataagcaataataaagccccattttcctttgagctagtttgagttgtgtttctatcacttgcaatcccaagagcctgagtactataacagatcacaggattgccagagagcaataaatgtgagggaggatatgactgattgggaagggagatggtggggaagtgaacctgaagaaaaaaaggaaaagtttacggccgggcacagtgactcacgcctgtaatcccagcactcttaagaggctgaggcgagtggatcacttgaggccaagagtttgagaccagcctggacaatatggtgaaaccccatctctaccaacaatacaaaaacttagccgggtttggtggcatgcacctgtggtcccagctacttgggaggctgaggtaggaggatcccttgagcccaggatgcagaggttgcagccacccgtgattgtgccactgtatttagcctgggcaacagagtaaaaccctgtctcaaaaaaaaaaggaaaaaaaagtttacagtgaaaagagttctaaaagattggtggatttttatgaagaaagactgagaggaaaacctcttttgaaaatttaacctagtcagaaaataagttgttttctgaagaaaaggtgttattcctttccgtgcaatattaatgtttgaaatgttcacagtctttgtgtattaggatgttggaggttaaaggagtcaaaccgttgtaggtttgatttcaactggaaagggcagaggccttggaggtaacctgaccattggaattaatgtccagcctttccctcacttcccttgtatcccattctgtgttcatagacaactaagagaaaggagggcatgttttctggggctttggtttgtatagttccagggaaagacgtttcagttggcccagtttgaatcagataacacactcagtaatcactgtgtccaggagcagtgtaaggtactggattctttagcatttgagaccgtgaacaagagccttcaactagaagaaggcaggtgcagtacaagactggtccctgacagaattagcttgacctggacagctgcccaaattctgtttactacagcatattactttcagtgttctctgaagtagtgagggtatatgaaaaagggggccaaacagtatattctaagggttgatattactgcatttgtcttttgttgtcagcacaagttgccattgtttttacttcactgcttcagaagtagttggaaccaactgaaaatgataacattatgaaaaactaattattataaagcacaggaaaaaaaaaatgagtaggctaaagccagctgtatataggttctgaaataactgttgaagtgtttaaattgctcattgaaataaacaatgctttatgtttaggaaatgtggtttaagtatctaaaccaatgcagtaagcctaactgaaagcattatagtaaatgcatgaagaacagaatcaagtagcagcatgagttctgatcccttggtgctaggaagaattgctgggccctcactgaaatgaaccatgagtcttggttagcatggtatttttgcccagatgttgcttgtccggcaaaatttaagcattcatgggagtcagatgctgctgccaagttatggcatcctggagtccagttgctatctatttctattcttccatggatgatgtgctagaaacatagaaaagacagtatcttttttcatccagatgaaatgatgcattagaattcctgaactaacacacacacacacacacacacacacacacacacacacacacacacacgagaactgccaagatagttacttaaccacgagtttatttgttaaattaggtaacaccttacaagcatttaaatcacttgatttgtaattggaatcctctttcatcccatgaaattcaattaaagtacatatatcaagtcatgaggaaagattattccaaatacttacacattgaatattggggaagggaaggaatgtgaatgttcaggcagaaccttttaattacatgtaacttcaactaattcaataaagaatatggactctaacaggctaataatttttcaacacattatataaattatacatcattttaaaataatttagtgcagtctgcaggtatgtttatttgcaatgatggtttattaaataaattatttattgagtgcctatttgcatgttactataccatttcctgttaacattaagaattatgaattcacatatctcaggaagtcagccatttagattgttagataacatgaatatactgaaaaactaaatacctttaagcagcggctctgttgaaagtaagagaagtttgtatcagtcaaagtttgatcagaatgtcagaaccactatgcaggatataagggctgtatattagtccgttttcatgctgctgataagacataacccgcgattgggcaatttacaaaaggaagaggtttaattgcacctacagttccacatggctggggaggcctcacaatcatggtggaaggtgaaaggcacatcttacatgcagcaggtaagagagagaatgagaaccaagtgaaacaggtttctccttatcaaaccatcagatcttgtgaggcatattcactactacaagaacagtatgggggaaaccgctaccatgattcagttctctcccaccaggtccctcccacaacacgtggaaattatgggagtacaattcaagatgagatttgggtggggacacagagccaaaccatatcaggctgatgtaggggttagaccttatgcattcctttgagttaagcaatctgtgaggctgttgccccagtatctaattctgggcctgacaaaagcagagccatctgtaagggaagtagaagagagcaagaacaacctggaatctgtgaggaccacctaaaactcattagaataaactagaccacgtggctgtctcttgtccttgccacttctaaacatcggactttgatgatgcacatgacctacagaagagcttgtatgttccaccaaggagcagcacacatacttggcccaggatgataagaagctggaaaagctcggggatcagctgcaacccaaggatatctggcaggagctacagaagctgcaggcccagcactgctccaggccaacagtgtgagccaacagattcacaattgtgtgtgctccactgtagtacctgaccttatgccaattttccaagtgtaagcatggctactgcttcatttccaacgtccacatctcacgtaagcttcttttggccagccctaacctaaaactgtacagaaaggggattctgggcaatgtagttctggattaactaaattgacacaacacagagccatcatggttcacccttgtcagcttggcagtcagatacatctttcagccgtactaaacttccaaataaggtgatagcagaatcgtgttttatgccaaacacagtaaaactttccctcttacaaccaaaaaatcactaatttactccccaaaagagaagacaagtctctattcatctttaggtgccattcatttctcttcaagctccttgatattgcataacttaaatactgaagtatgagtctaaatactgttaacatattttacattaaatggcaggaggataggagagaggaataaaaagtttgattcatgtatacaaatacagttctatcaaaataagaaaaaagcatttataactgttctagtcctcatttctgcaactgatcacagggtcattgctggtatttataaccactttcttctgatagccagtccctattctctttgtccttggcaaacactttgtccttaccacataacatgaccaaaacctggaagtggaactttcatatactgctgtgggaatgaaaaagtggcacaaccacttcgtgaaatagtttgacagtttcctaagtagtttaaacacctcaactatatgatatatgtgtgtttagctttgagagtgaaaagcatatgtccatacaaagacttgcacacagatgttcatagctgctttttggtaatagttaaaaactattagaaatattcagatatccattaaccagatatccatccaaaaaccaaatatccatcagcaagtaaaaagatgcacaaactgcgatactaccatataattgaatattactcagcgataaaaaggaatgaactattgaaaccctctgcaagatgatgaatatcaaaagttattattcggagtgtaaaaaattcagacaaaaagagtccattttatttacataaaactctagaaaatgcaagtactctagggacacaaagcaattcagtggctgcctgaggacaagaagcttgtgagttgggtggaagaggcggactacagggaaacatgacataacattttggggtgatttgaatatgttcaggatcttgattggtgggcgtttcatgggtaaatacataagttgaaacttaccaaagtaaatagtttaactatgtgtaggttcttgcatgtcgattataccttaatgaagttatgactgttaaaaagagattggctctaacaatggataatctgtgtttttatataccgactagagtgacattgctatgttgtaaaattataaaagatttattcacttgacctgctattttttaaattatgtaattcttgatgagtgtttgttttatttgcaatttatatgaattcacataaattgcaaccacacacctctaagtggttcagacaagtgccatggggattgaaaggagagagggataacatttaagtcagaagtttaggcttcagtttaggtattttaatttgaacttagttttaagaggatgggttgggtttgttaagtgaagattcaaggaacatcagtctaatcaacggatgcagacataggtgagaaatgagcagaagtgcatgatgtgctacagtccatcacttacactgtcttttcagatcctcatagtaacttcaattgttggagaaattattcccatttgccgctgaggaaactaaggcttccgatattattttcttcaaccccagggtcagaaactggctgagtctccaactcccttgggcagtttgctctgttcctgagatagtggcgagtgtgaccaggggatacaaataaagtaattgagaagcttgaaagtagcgttagggctagattagtgatagcctttgaataactttcaaagaatttggacttttcagggtccattgggaatgagcagtgtgagaagtccattaaatgtttttgagcaagtaatttgatgatgtttctatagtagtggcaatagtagagtgaaccaggaagggtagatttgagaaatattatgaagtccaaataatcaggatatggtgatgaattagatatagttggccaatgcatggaagaaatcagagccgattctaaagattttgacatgggttatagagaagttgtatgtttaacaaaaaaagaatctggagaggcactttgattttcgtggaaatgtgttgaattcaatttgagacacattgagtttgtgatgttaaaacatctacataaaaaaaaaaaaaaaaacagcaatcaagtgacattacagaattggagcccaggagaaagatggggctgcacacgtagtggttttattgaaagataggagagtgaggccgggcacggtggctcacgcctgtaatcctagcactttgggaggccgagtcagatggatcacaagatcaggagatcgagaccatcctggctaacacggtgaaaccctgtctctattaaaaatacaaaaaattagccgagtgtggtggtgggtgtctgtagtcccagctacttgggaggctgaggcaggagaatggcgtgaacccaggaggcggagcttgcagtgagccaagattgtgccactgcactccagcctgggcgatagagtgagactccatctcaaaaaaaaaaagaaaaaaaaagaaaacaaaagataggagagtgaacacagaaggctagggtctgcactttgggtaaggctcattgtgttggggggaaagggagatgttgcttcctcttcatctccactgtcacagcccttgttcaggccctcatcatctcttacctgggcttctttacgatgttttctgtcaaaatcatcctccaagtggcagtcatagggatcaatccaaaatacacctcgtacacagcagagtcatggcacattagcatggcacgtgaggctctctgtgacccttgtctacctctggagcttcatcaccagccatccagcaacactcatgataatagcaaataaactgatcttcagtaagtacattctgtgtgccaggcatcatgccttatgtacattatcttaatccttacatcacctgacaagtgatatattattatttttggtttgcagatgaagaaattaggtttactcaggttgcacagccactattaaatggtaaatctgaattttttttttgagacggagtcttaactctggtccaggctggagtgcagtggcacaatctcagctcactgcaagctctgcctcccgggagggttcacaccattctcctgcctcagcctcccaagtagctgggactacaggcacccgccaccgcgcccggctaattttttgtgtttttagtagagacggggtttcatcatgtatccagggtggtctccatctcctgaactcgtgatccgccccccttggcctcccaaagtgctgggattacaggcgtgagccaccgtgcccggcctaaatctgaaatttaaccctaatttctctagctacaagactaggctcttaatcagtctgctgtgttgaacttctgctaggtactccagcatttcatcaaagttctgcctcctacgcatttgtttgtgcttcttctgtgtctggagtgcttgtccctcctaccctatgcccttaaccatctagccctgctcagcctttaagcttcccttgaagagtatttgaggaaaatcatccttgcccttttctgtctccctagctgggttcagagcccgttctctggactcccataatcctttgcacaactctgtccttctactgcacatgtgattataattaaccgggttctcttgtctcagtctttctagtggattaggggttggcaaacattttccgcagagtcagacagtaaacattctatgctttgtgggctatgtggtctctgttgcaactacccggctctgctgctgtgtaaaagcagccatagcaatactaaggcaaatgagtgtagctgaattccaataaaactttgtttatggacactgaaattttactttcatataattttcacatgccacaaataatcttcttttaacttactttcccaattattaaggagatataaaaagacagtggcttgtgcgccttaaaaacaggtacaggctggatttggcccatgagctacagtttgccgacacctgcatactgcatagagtaagaacttcttgaaagcaggttctgaatctaactgacttttgtatccccattgtatggtgtgtagtagacactaaggaaattgtatggactgaataatgagcctaaagaggagcactgagagaatgtagaattaggagaaccccttttaagtagtgtattcaagtcaaggcaggactgttttcaaaaggaggggaacattctaggcatttatcctgtaagaataattgcacacatatgcagatgcatgtttagggatgtttgtcgtatagaatgatgaaaaacaacctgcctgttcatctctatgggattggttttatggtatatccattaagtggaatatgctgcagtcgataaaaactgcaactgccacagttgcttccaacagaaaccaattcaaaaaagccacctgtagagtgagcactgccatttcctaatctggggtcttctcatgcagccatggcctcaggtagagcaggtgaggcaatacagactcctgacatttagtttcttactctgactacggccacactcttgggctgcagcagtgcccaggaagctctgaaaactcaggcttggtagacagttccttttgcaatgcatgtaaaatgcttaacatgtgtagcccatccttcataaaggttagccatcaagagaagaatatcttttattcttataattacagatgacaaatgctctcttaatgctgtggggatagtggtggttatcattattggtatgtggttttattttaaaggtctatgaatcacaggtacctgaccattggttaaatgagctgtaactggatggtcattatgacccaagtgtgagggactagggctagtagatacttactatgaatgacagggaatcctcactgtgggtaactactcagagtttgtgagtgaagtgactatagtaacctgaaaagaagaaagaaaaaaataaataatcgtattggaaaatgtcattgtgtttaggaatactaagacatcgtaaaaaaaaaattaaaagtaggtagtttgtagtataggatatggggaaaggaaacatatgtcaaagttttttacaaaattaaagggaacacaacttaccagatgtcccaaacttatggggaaaaattctacatttctcaaatagttcagaataaattttctttcatttttaacatatacttcttagtaaatcatactagatgacttgtaaaagtacaataaaatagaatgtcacttatttgtctttttagcactagtgtttatttttttctaatatttatagaacacatattgagtacaacacactctacaaagagctatgattcatacagacataagtaagaaatgatccctgccactcaaatctagtcagaccaggaatttctgaaatctgttacttacgtttctcttgaaaaaaggtttcatggtgaaataaatttgggaaacactgcctaaagtaaggttaatttggtttcttcactttgggatttctcagagattttattgtgctcatatgatttgaccatagagtcgttcttcctgggagcatctccggggatggtaagggaacatagctggggaagtactgacttcagccttccattgaattattgtttcgtctgttgatttggttctagcccatttagtcaaagatttcttaaataataacctaatcagcacattttttgagtactctgttttaccaaaaaaggagacaagtaagagacattaataacaaatttaagaacatacttgtacagtttgtcaaggctttggaaaattagttttgataataccttgggccttgtcttttaataggtaaacaattaaaactgtacttcattgttaggatgaccataccaatctattgtccaagctaggatgctttcagagtgagagaggttgctgttaatgatgctggcaccaagatgtaaattagaactatcctgggcagaataggatgattaccttcattgcagtataacctcagtttcatctgagatctctgagatcttaattacgtcagccctggttctttacatcagtagcccattccccagggtcagttgattcttggttgattctcaggctttgggttgtgtgaaagattctgaaattatttacaacgctaatgcttcaaacctgaaactatacagttgagccttgaatgacatgggtttgaactgtgtgggtccacttatacgtggatttatttcaaccaaacacagactgcaggatgtgaaacttgaacttaaagagggaccacattttctcataggcaggttctggagggcctactgcgggagttgagtatgtgtggatttggttatccacacatggggggtcctagagccaattgtctgcatatgccaagggacttggctacttgtatgtttaacaggtgattttcaaagtggataaaagtagatattcctgacacctagtgcaaattattgttgttgttttggttttttgtttgtttgtttgtttttttggaatttttcttcaagaagtgccagggtattgatttatgctatcgaaattaaaatgaagtttactacagaaaaaatgttcagtactaaagcggaagaaaagaattgttttatagttaatgttttctgtcttttttcattctttttacagttttttgaggtgccatttgactcaaacatgaataggacaaagaacagaccgctggttcgtggacagatcaggtaaaatcacgaatacaagtgtcttccacattataaaacattcatttgcttgttcatctgaatcatttcccactattttgctttgagctgcgaagtggaaataaaatacccacaaagaaacaaagtgatatggaaatgcaatactttccacctctaaccaaagtgtgttacaaagcacttaagatggatgtaagagtggcagggtttttttttatggtagtaacttatgtgatatatatatatttttaattccactttgaagcatagactttctttcatttgtagtggctgaagataaaaacattgcattaacgcaaatgatcttcagacaaatccatctagggtctcagaagaaggatatgtctgaaatcttactttttcagataaactgataatgctgttgtatgccaagtaaagtactgcctccatcactctccaccagttgcaattaagtagaaataaaaggcatataaatattttaacatcactaatggttaataattaaacattttacttcctggagacctctaaaccggcatttaaaaaactttttttttaacctaatatatattacaagcctagaagaataaaaagggccaaatggtttatactgactatgtaaatcactggattctttcttcacgtttccaggcaatgccctcatggagcttaaaatttattgtgataacacttgtgaatcaaatgatcacacatatttaagtaaaataataaaggaagcaagtgtatatgcagtcagattaatctatgcagaaatgatctttaatattagctggttttagacatttctcaatgaatttaaaatatcattatagtaaaaagggcaatagaaccagatgaaaagatataagaacaaaaagctcacatctactgatattttatttcctttttctgaaatataaacaaaggtatatggtgtgtttgaggtttagaaactgtcaaaagtacttttatttgggtagatctgttttagaggggaaaatgcaaagtctgtaacctatctcaagagctaaaagctgctctcgccactggtaatgctttggaatttctgttcagtcatttttcctcagtgaaattataccctcctttagaaccagggaattgtaggaataggcccagcaagtagtctttaagcataatcagataaaggctcatcattttaaacagcccatcttactttgtccagtgtggtggaagcacaacctgttagtactcaggagggagcattggggccttagctgttgtaattggcaacactgtccttttaaagggggtttggatcataatcccaaaagacacagtcccaaatattgaagtctcaaaagatcaaaattcctaaagtctagaatccctaatgtccaaaggcccgaaaattccaatcacaggatagtaaaatcatgttaggtggaactatcactttaatctttatttaaaaattaagtatggtttaaggaggtgcatatggatgccaggttaacaaggggtgaacttgtggacttaattataggtgtcagcttgactagattgaagaatacctagaaaccagggaaagcattattttgggtgtgtctgtgagggtgtttccagaggaggatagtgtgtgaatctgagtggagtagatagggaagatttgccctcagtattggtgggtaacatccagctggctggaggctggaagagaacagataaagaaagtgaattggtatctctctaagagctgagacagacttatcttctgctgccttagacatcagaacgccaggcttgctggcctttggactccaggacatacaccaggagccccctgggtcctgaggctttcagcctgagctggaaagctcctagggtcattgacatcctagggtctccagcttgcagatggcctgtcgtgggacttctcagccaccataattgcatgagccaattccccttaacaaatcccctctcatatatctatatacacatcctattggttctgtatccctgtagaactctgactaatacagatttgccactggggaagccaaatattattccttcttaccgtatttcttacagcacaatggaagagatctgtgatattgttccctctaaaaaaagactatgataagttaagtgtatgaggctacctaatggtgaaagataaaaattttaaagctaattattattggtgctttgaaagcagaaaattgcttaattgcaacagctggcaataaccagactttcaaatggatagcatatacttataaaatttgtagaccacaatcactttcagaatacaagtgtaatgagtgttttgaagatcatagaagtgaaaatactggcaaaaaatacaagaaatcttctctgccaaattatgctgtcatgtacaacttctaccccttcacacataacgctatatttgccttcaaaaaaatgcccttcatcagagaataaaaggaattcaacaagcccagggacctcctgaaccaaagacacttgctgatattgaggtttctctagtgtcacaaaaaaacattaaatggtgacctattcttgattagtgatttgactgtcaaagaagacagacttcttatatttacctctaagtctgatatagaaaaatcagcacatgttttacgttggctaatggatggcactttcaaaactatccctgctttttttttttttttatcaactacatagaatttatgcccctgttggatccacaaattctagaatttattccctcctttatgtattaatgactggaaaatgtgaagcagttcatatatacttatttgaagatttggaggactttgcaaaagaaaatggattgtaatcgaatcctcaaacacagatatagagttaggtgcgatgaaggcatctaaagtaaatttcaagatgttaccaataaagtttattttttccattcagcccagtgcatttggcggaaaattcagatgagcgggttggctacataatttggcaacactgaaatccgaaaacctcactttaaaaatacatcatttgcctgcattggcattccttccaacttacaacattccaggagcttttaataaattaaagctgcatttgcctgaagaagccaataaagttactgactggtttgaaaataatcatgtgcgtgttaggataagatgacatgaaatggtgctgctcttcaaccaccagtattgtttccaccagatttatgttctgtatatgggtccatgtggaatggatttccttttacccaaaataacatagaagcatggcataagacaggaaaatttatttatttatttatttatttatttatttatttagagacagagtctcactctcttgcccaggctagagtgagtggcgtgatcttggctcactgcaacctccacctcccaggttcaagcgattctcctccctcagcctcccaagtagttgggactacaggcacgtgccaccacacctggctaatttttttgtatttttatagagattgggtttcaccgtgttggccaggctggtcttgaactcctgacctcaagtgatccacctggcttggcctcccaaagtgctgggattacaggcatgagccactgcgcctggctgcaaaaatttaataaggaatgctcatgtcagtttatatcaaatcatagaagagtttcaaaaagatcagaaccacattgaaaatgaatgtgaatgtattctccaaggagagccatgtcttaaaagaaaaaaagcagctattcatcgtgatgcaagaaatcaaaatataggtaatgattgtgaaagtcggcctgctctaatggactgtctctgttcagttgctcataatctatccctgtaataatctttcatttgtctgattttcttttttagtttttttctttctctcttttcagtttttttcacaattttaaattgtcagctttgtttttacaattcactctatgctatgtatttcatctgcacatcatttccaattctggaggtgtagatggtgtaaagccttttagagttctaattcactttatgtgttttttgcaaatctgactccacaaagtgcattatcacaaatttggctttgtgtattagcattgtgcgtgtatgtaaaaacaccgacagttcctcaacaaatgaaaagatgtcctttttatatatctgtgtttgtgaaagataaaagttctcaagatcttggctctagggactgtgtatgtggtggtggtgtcccatcatggtttttgagcaatcttgtgaaaaggcttaggttgtttgccatggtatttcagaggaacacagttataccgctggctgcacaccattaccatccttagtgatatgcatttatacagttcctttgacctctttatgaataaggtttgtctgcttctaactgttatgcccatgtgactgtcattagtatacctgagtgtttgtgcttgcacaaatgtatatcttattattgtctattttattgtgtaaagtggcttataaaatgttctatcatgtttttgtatgtttctcaaattcccttttaaaaatgtacagaaatatcttttaaagaatttttaaattattttttccagaattatattttcaggattttgatcttttgggattttagactttaaggattttgatttttccagatttcatcatttgggattatggcgttctgttgaggaaaataaacaacgggtttctaaacatccctttgtgcaagccatagacaaaatggcaaagaatagatccccgtgagaaccgtttagagtatgtgaccttggagcaagtgaggaagaagaagcccttcgccagacattatagctcaaagatgtatctctagctattcagctagatccagagattaaattgagtcagtgaaagaaaggagaggtgtcattgttatgtgtatatcaggtgattaggatgaaagagatcacgtagggaaagtgttttcccacgtagcatgattgtaatatgggctgaaggtcaaatgggtttgcctaggtcagtcctggtttgccccaacagaattattgataacgtcctctttccctttcaacaatgcccagtttggatgttaactacatgtcaccccgtacagagggaaagatgattatgatgctcacagaatttccttatttctaaagctttttcatgcaaattggcattgcttcttttgcttagaagagaaaaacatataaatgtaaagtgtaatgtatctaaattattatagtttgcaggtatgcaggcatacctcattttattgcactttgctttattatgcttcatagatactacattttttacaaattgaaggcctgtggtaaacctgcagcaaacaagtctgttggtgcagatttttgcagcagcatatggtcactttgtgtctctgtgtcacactttgataattcgtacagtatttcaagcttttttattattatatctgacatggtgatcagtgatgtttgatgttactgttgtaattgttttggggcaccataagccgtgcccataaaagacagcaaacttaatcgataagtggttgtgtgtgttttgactgctccaccaactggcagtttccccatctctctcctgctccttggacctccctattccctgagaaccaacaatattgaaattagcccaattaataaccctacaatagccttgtgtgtgcaagtgaaagggacaattgcttgtctctcactttaagtcaaaagctagaaatgattaagcttaatgaggaaggtgacatgttaaaagctgagataggctgaaggctaggcctcttgcaccaaacagccatgttgtgaatgtaaaggacaagttattgaaggagattaaaagtgctacttcagtgaatacacaaatgataagaaagtgaaacagtcttactgctgatatgaagaatgttttagcaatctggctatatctaagcagccacagcattgcctcacacgaaagcctaatccaaagcaaggccctaactctcttcagttttatgaaggctgagagaggtgaggaaactgcagaagaaaagtttgaagctgacagggattggttcatgaggtttaagaaaagaagctgtcttcaaaacaaaaagtgcaaggtgaagcagcaagtgctaatggagaagctgctgcaagttatccagaagatctagctataagttcattgatgaaggtggccacactgaacaatagagttttcatatagacgagacaaccctctattggaagaagatgccatctaggactttgatagctagaggggagaagtcaatgcctcacttcaaaacttcaaaggataggctaactctcattagaggctaagactgatgctatctttgagttgaagccagtgctcatttaccattccaaaaatcctaagactcttaagaattacactaaatctattctgcctgtactctataaatggaaaacaaagcctggataccagtacatctgattgcaacatggtttactgaatattttgaaacctgttgctcagaggaaaagattgccttcaaaatattactgcttattgacaatgcacctggtcacccaagagctctgatggagatatacaaggaaactaatgttttcatgcctgccaacacaacatccattctgcagctcatggatcaaagagtcaattcgacctttttttttttttttttttttgagacagtcttcctctcactcaggctggagtacggtggtgcgatctcagctcactgcaacctctgcctcctgggttcaagcgattctcctgcctcagcctcctgagtagctgggattacaggcatgtgccaccacgcctggctatttctttcttttttttttttttttttttttgtatttttagtagagatggggtttcaccatgttggtcaggctggtctcgaactcctgaccttgtgatccgccctcctcagcctcccaaagtgctgggattgcagccgtgattgactttttagttgtatttaagaaatacattttgtaaggatgttgccatagatcgtgattcctctgatggatctgggcaaagcaaattaaaaactgtctggaaaggattcaccattctatatgccatgaaaaacattcatgattcagggaggaggttaaaatgtcaacattaacaggggtttgaaaaaagttgcttccaactctaatgtatgaccttgaggagtttaatacttcagtggagacagatacgaaagaaatagcaagagaatgagaattagaaacagaccctaaagatgtgactggatagctgcaatctcatgataaaacttgaacacatgaagaattgcttcttatggatgagtaaagaaagtggtttcttgagacccaatgtatttctgacgaagatgctgtgaacattgttgaaatgaaaacaaaggatttaaaattttatattaacttggtagataaagcagtgtcagagtttgagaagactaactccaattttgaaagaagttctactgtgggtaaaatgctatcaaatagcactgcatgctgcagagaaatctttcatgaaatggagagtcaatcagttgggcagtgtattagttcattttcgcactgatataaagaactacctgagactgggtcatttataaagaaaagaggtttaattgactcatagttccacatggctgaggaggcctcaggaaacttacaagcatagtagaaggtgaagcagaagcaagcaccttcctacatggtagcaggagagagaaacagcaaagggagaactgccacaaacttttaaaccatcagatcttgtgagaactccctatcatgagaacagcataggggaaaccacacccgtgatccaaccgcctcccagcaggtccctccctcgacatatgagaattacaatttgagatgggatttggtggggacacagagccaaaccatatcattccacccctggctcctcccaaatctcatgtccttctcacatttcaaaacacaatcatgccttcccaacagtccctcaaagtcttaactcattccagcattaactcaaaagtccaagtccaaagtcccatctgagacaagggaaataaatccctttcacctatgagcctataaattcaaaagcaagttagttacctacaagatacaatgagggtacaggcattggctaaatgctcccattccaagtgggagaaattggccaaaacagaggggctacaggccccatgcatgtccgaaacccaaaagggccatcattaaatcttaaagctccaaaataatctcttttgactccatgtctcacatccagggcacactgatgcaaggttgggctcccaaggccttgggcagttctgctcctgtggctctgcagggtacagccctcatggctgctttcatgggctgccattgagtgcctctggcttttccaggcacatagtgcaagctgtcagtggatctaccattctgaggtgtggaggatggtagctgtcttctcacagctccactaggcagtgctctagtggggactctatatgggggctccaaccccacattaccctagcagaggttctccatgagggctcagcccttgcatgcagcagacttctgcctagacatccaggcatttccatactctgaaatctaggcagaggctcccaaagcccagctcttgtcttctgtgcagctgcaggcccaacaccatgtggaagcaaccaaggcttggggcttgcaccttctgaagccatggcttgagctgtaccttggctctttttagccccagctggagctggaacggctgggaaacagagtgcccaccatgtcctgaggctgtacagaacagcaaggccctgggctcagcccacgaagccatttttcactcctatgcctctgggcctgtgatgggaggggctgcagcaaagatctctagaatgctctggagagatttttcccattctcttggcaattaacattatgctcttcattacttaacgcaaattttctgcaggcagcttgaatttctccccagaaaatgggtttttcttttctaccacatggtaaggctgtagattttccgaacttttaagttctgcctcccttttaaacgtaagttccaacttcagaccatctctttgtgaatgcatatgacggtacaccttcagaaaaagccaggtcacctcttgaatgctttgctgcttagaaatttcttctgccagatatcctaaatcatctctctcaagttcaaagttccacagatctctagggcaggggcataatgtctctttgctaaagcatagcaagagtgacctttactccaattcccaataatttccttgtctccatctgagaccaccttagcctggacttcattgtctgtatcactatgagcattttggttaaaatcattcaacaagtctccaggaagttccagacattcccacatcttcctgtctttttctgagcccttcaaatttttccaagccctgcccattacccagctccaaagttgcttccacattttcaggtatctttgtaagagcaccccactcctggtaccaattttctgtattagtccattttcacactgctgtaaagaactacctaagactgggtcatttataaagaaaagacgtttaattgactcacagttccacatggctggggaggccatatggaccaacaaactgacttgtttgaacatttctggcaaatcgttctggctataatgtttgttgtaatgagggagttagatttagagcctccttttattctctggcaaagaacacaccttagagtgcatatgttacatattagggacttacattgaagggtgaacactttggtttggatgtggtttgtttgtcctcaccaaaacttgtgttgaaagttgatccctaatgttttggtgttgggaggtagggtctagtgggaggtgttcgggttatgggatcagattcttcatgaatggcttggtgctgttgtcatggtgaattcattcctgctctcaggagactggattagttctcatgggaatgggttagtctctgagagagtgggttgtcttaaagcaggatggcctcaggttttcccatttgtacatgtctgcttccctgttgaccttctttgctatattttgatgctgtatgaaagctctcaccagaagccagagccatgcccttgaacttcacagcctacagaacagtgagctaagtaaactttttaaataaattacccagtctcaagtattgttttatagcaacacaaaatggactaatatattgagtaaacccgttttacaagttgaatctgcaaactcagtcatgcaatgaaggtaaatgtcagagaagtttaatctcttaatataaagttagattcagtattatccagtttttttaacttggtgactggaaaaagccaattagcaattttacaaatttttatgtaataaataacatgtcagtcttcaggtattcttcatgtgattatcatggtctgatgaaaaatgttacttaactgactctaagcatgacaagtcatttaattaatctttccacattactgcttcctcatgtgtgaagaagaatcttaattgctagcctaggccaggtgcatggttcacacctataatttcaacaatttgggaggcaaaggtgggcagatcgcttgaggccagcagtttgagaccagcctgagcaacgtagtgagaccctgtctttacagaaaaaaattttaaaattagccgagcatggtggcacactcctgtcatcccagctccttagaggctgaggcaggaggattgcttgagccctggatttggaggttacagtgagctatgattgcaccactgtactccagcctggggaacagagtgaaatcctgtctcagagaaaagaaaaattctaacctgttcatctcataacattattatggatataataataagatcactaaaatcatgtaaataaaagtacattgttagggaagaggtttaaaactgtagagaaatatagagttgtttacagaatttgaatgtctttaaaatttgcttgaaaatataatacttgtcagctaataacataaaaaagaaattcaagttattttcaaaggatggggagaagtaagcaaaaacacacgctgaataagcaaactcagagtgaaaactgtgtttccattatgattaagttggtaggcaaaaaatactcagtggaaagtagagtggtgggttattgaacctttccctcatactatcatcatcggaacacttttgtggagtgttgtctatgtagaaaagggtgctagttcccaaggttgcagagaggtaaataacatggtcttcattctcttggaatcacgtcgaggagatggcaacacacgtgcattaaaaggacactaagtgttgtcaaaggtacatttcactcaacaaatgtgtttttttagtgcacatgccagccaggcatggtgctcgaccctggaggtgcagtggtgactaaggcacacttctgtgtcttgtggggttctgagtcatgaagcacctcatatgtgtgtaatgtgctaaatactacaaggacaggcccagtgtgacgtgggagcacaaagagaagtatctacctcaaactgaggagaccaaggattacttctcagggaatgcgtcttgaagctgagaaccaaaggttgagtaagaaataagccattctgcctgttccctgctgagctcttgtttctgttccttcctcctccacctactctagtttggtggtccttaatctcctcctcatctcacttccctgcatttgctacactccacactgtctgtacctccaacccagattgcttttctgagcctagttcctctgaaaatctattgggctgcccctgcaggcagctcacattttgtgtgtattcaccccaattcactttctttcccaaatctttttccttaataccttaatttatgttccaaagtcaggcacctataagccatcctagacactctttttctgttatctccttcatctgattactcaacagattgtgtcttttcaaccccctgatttaccctggaatctgtgccctctcacctcagtgctttagcttcagcccatcatcagttttgcgtgggttattacagcacatcccagctgacttctctgccttcttcctaaccctccttccatctgtcttccactcaactggcagataggtcttccgtaagtgatcactgtttcaccaaacatatttaagacaaaacacatatctttgctgtgatgaaaagtactataataaacatgagtacaggtatctttttgattaatgttgatttctttccttttgggtagatactcagtagtgggattactagatcaaatggtagttctatttttagttatttgggagatcgccatactattttccatagaggctatactaatttacatgccccgtcaacagtgtgtaagagttcccttttctctgcatcctcatcaacatcttcgttttttgtctttttataataacaatagctcttctgactggggtaaaatgatatctcagtatggttttaattttcattcctctgatgattagtgatgttgagcattttctcgtataccttttggctattcgtatgtcttctttttttctttttcttttttttttttttttttttgagacaggtcttgctctgttacttaggctggagtgcagtggcaggactatggctcactgcacccttaacctccagaactcgtgatcctccccgctcagcctcccaagtagctggaattacaggtgccagtcgctgggcctaggtaatttttttttactttgtgtggccggtttcgaactcctgggctcaagcgtttctcctgccttggcctcctaaagtgctgggattacaagtgcgagccaacacacccagctaattttgtttttaatttttttgtagacacagtgtctcactatgttgcccaggctggtctcaaactcctggcctcaagtgatctttctgtcttggcctcccaaagtgctgggattacaggcatgagccaccatgtatgtcttctttcaaaaaatgtcatgtcatttgcccacatttcaatggcattatttgtttgtttgtttgtttttactattgagttgtttgaattccttgtacattctgggtattaatactcttgtcacgtggacagttttaggcaccattttcaatactatattacagaggtgaacaaaacagaaaaattcttgctgtcgtggagcttgcatgctagccattatacctggcaggtagctaatgcttaataatggatagatggacaggtggatggatgataagagaaagaaatgacctcctaggtgggagaaatacagaagtaaagataccaaagaaggaatacatggcatctgctgccaaggcaatgagaaggccattcggacaggagtggagaatgagcgaagagacaaaatgaacatcaagatagagagacaggctgtagaccttgacagacagactttggataggtagagaatgaagcaaagaccatgtcaggcaagatgaacatggtgagcaaagatgcaaagatgggagtgcaaaatacatgtgtaaggataaaaacaggcaacctggccagctgtagagggaaggatgtgtataggagaattgtgaggaagtaaaactgggaagaggttaaggaaaatgtacggaccagactacactgtgagggctgttctataggaactggaccttggtcagtgttgttctggagctcctgactagtatataataaggcaagagagagaaagaaaaggcacatacattggaaagaaatgaaattcttttcacaatgtcattgtttacatggaaaattcaaaggaatctacagaaaagctactaggagtaataagtaaatctagcaagggtatagaatacaaggtcagtattccaaaatcagctgtggaattccacttccagcatgacaacatgggctgctccccagtgaaactgggctcggcggaggactcttcgataaaacacaaaagccacaaaccatgcaagaaaagtagataaactgtacttcatcaaaattaaaaacttctgctcttcagaagacacttaaaatgaaaatacaagccacagagtaggagataacatttgtaaaatacagacatgatgaagaactcatgtacagaatatagaaagaagtcttaaactcattaagaaaagaaccttaaaaatagacaaaaggggccgggcacagtggctcaggcctgtaatcctagccctttaggaggccgaagcaggaggactgcttgagcccaggagtttgagaccagtctgggcaatatagtgagacctcatctttacaaaatttttttaaaaaattaggtatggtggcatgtgcctgtagtcccaactacttgggaggctgaggagggaggatcacttgagcccaggaagcagatgttgcagtcagctaagatgatgccactgcactcaagtctgggtgacagagcaagaccctgtcaaaaaaaaaaaaaaaaaaagtgcgtgaaagatttaaataggccctactccaaagaagaaatacaggcgttaaataagcaaaagattttcaacgtcagtaatcatacgggaaatgcaaattaaaaacacaatgagataccactacacacctattagcataactaacatttattaaaaacaacaatacagtgctgacaagggtgtagaatacctgaagctctcttttattgctagtgtgaatgcagaatggtacaatcaattccaagaacagtttggcagatttcaataaatttaaacaaaatttaccatacaatcccattcctgtgtatgtatggacacatgtccatacaaagatctgtacatgaatattagcttaaatatcactaaagacaacctaaacatccctcagctgatgaatagataaacaaaatacggctgaaatactactcagaaattaaaaggaacaaaccactggtacgtgcagtgacacgggtgtgtttcaaaagcactacgttaagtgaaagaagacagagacaaaagacagcatgtcgtatgattccatttatatgacattttggaaagccaaaactaggcacagaagtaagatcagtggttactgggaaatagcggggggggggggggtggataggagggaattggctatagaggggcgtaagaaactttttgaaaagataaatttatatgttctatatcttgattgtggtggtggttacactatgtttacctttttttttttttaactcagaactaactgtacacttgcaatgggtaaatttgtgtattgaaaattatgttctgttttagactagattttcagagcacttggtttttccttggggaatagaatgttgtagaacataagattttggggtccgactgcctggaatcaaagcctagctcctctgcctgcttcaccttgcaagcctgaccatattactaaacttctctgaggctctgtttcctcgcctataaaatgaggtttgtgccttccacctcatagagttatgtgagaaaacgactgttcttataaagctgtcagtaaatgatactgctgtcatcattgttactacttttttcagaattgtgtcctcagcatctctggatgttacactctgtgctaaatgctggaatatgaccagcatgacctgatccctgccttcattccagtccggtggagaaggtagaactttagccagtgaacagttgagctctaaaagatcattctaggtgggcatcaatggtgccaaggaaagagacagaatgataatacagaacaattgggagagagcactccagagcgggaaggcactgggagggagtggattggagttgagaactgaaggagagtgatgcagagatctgggggaacgtacggtggccagagtgggcttctacctgacactataaatagaaaggccagtgtggtgagaacataatgaacaaggggcagggtggcacaagatgaagacagaagggctggaactccatgtgcagtgggagaagccagaaatgagttgtacaaatggggctggtgtgatcagatttaggttaaaagaacccctcagctgcctgggtaaagtagaccgtagaatcccaggagagagacttggggcagctcctggcatgacttgatgatagcttggaccagggtggtcacagcagaagtgaagttctgctgttactcagctcaaaattcaggctggctaccattgcctactcttctctgaaatgttcccgtctctattgcctatgtgtatcttcacctttgttacagtgctatagctctgtctacctgtaattcattataagggagaggagcagaggtgacattagaacgtaatcccagagaaggtgcagctcccctgttcagtcaaatcctcacagccagcaccaacagaaatacatttctgtttagccaggctgccgatgcttgtagcatgaagaataatagagtaaaccccgcagggaaacagaaccccatagaattctccacctcttctctactgagagtctccttaaaggcagaatggtttgaatgcccagccatctaaattaggcttttcttttgttccctcttaatttaactgagtgattctcaaactctagtgaacacagtcattattttccagaattgtacatacataaccttccatgtactttatggatgagttcaggggattttaaaggataattttgaatataatatagtttcaccttagggctgacctaaataaactgaataaactgcagctccactgttccaagaaattgaaaatgcatctggtcctaatacagctttgagtgccagtcttggtgctgcttgcctgtttgttactgagctcccttttgtctatgttgtttcaaatgatggagaaagtgaccttgaatatatgtaataaacaaggaatagtaagataattgactgtttttgaaatagttacagtaaaaaccctttacattttaagcaacatagaaattttctataattttttttttgcaaatcaaaggggaaaatgtttatagctaaaatgccatttaatgagaaaaaaatcaatgcaatgacattgtcatttgtttcattttcccaaggagaatacagaggacagtacttaagttttagttatgttgattgcttgtgtgaaatgctgattcctgccagcagtcgccaggtgtctctcacactgctgggagaggaatgtctcgtcttcttcatctggttgcctccgtcactgttctaggggcttctggcactggtgcaaggcagagctgtgcttccttgggagtgtgccaagcatttactttggttgtttagttctagtctgggagcagacacaaaaggaaaaaaaagaaaataccaactccatgtgtctgaggtatcacttatagtttaaaaaaaatgattgtcttatcatgtttgggaaaatactggtcttcctgttttcctcctatttaaattcatcctaaaacttccagggacacaagaaattattagctattttgaccatccattccagaaaagatggtggccttacaataattgcaagtggttaatagaaacatccttttacagcttctatttaccaaatgtagttcctgtggaagcacttgaccccgtggctttctgctttttatgtcagctctggggcctttatgatagaattatttatcagagtctttaatggctcggggccacttgatgaacttgagtacactgtacatcacatcacttaggaagcatcccagatgctcatggataaatctagagtcgtggtgcatttggctaaagagctcctgcatgtgaggaagtctggagaaaagtgctccagaggggtcacaatggagctgtgttaacctctgctgtcagcttctcaccacggagtttatccctattacttggagccaaaccactgcatctgttctccttaggctgtgtcagcgcagccacctcacagcctcagggacccatggcttccattctggatactcacactggtaagtgggacttggcagaggccaaatcaagtagtttgtttctgacacctctgagcccatttctttgccagttttatatcatcactagtaactcccttccctgtacctcttacacatcacacaggcagccagtgtccttgaacaccttccacttaacgaagctgcatatctgcttgcaacactcgtcctaataggataaaaggattaagtagttttagggtggccaagaggaggggacagcaggagacaagtggttaaaagtgaacgttcccaatatttcttctaaaatatacctcagttcttctcaggaggataaaaccaagtgttttgccctaggagattatagctgccagagtctaacacttattttggaatgtttccaggggtccttgggaccccttttctgtcttatggtcttccgtgctgtaagacctggagaccagctggcctgaatggaggttgtggggcctgagggctctcccggcacctctgccagccctgtcgcctcattggttccttctcttctgacttcatatttgacaggttgtccttctgtcttagacaaaaatctattaaattcgctgctccatccagttactcttctgtttctcctttttgtagccgacttctggaaagggtggcctgctcaccacttcactagttgcagctcagcttccagcctcaccattcatctctgcttttctctgtactttcactgcatttttctctctgcatggcggccctgccaaccactcttcacttaaatggactcatatcaaaatggcaacctcagccttagcccctaggtcctccagctgagttccctgtcccaattccaaatctttatgagagaaaatttgattgctccagcttgggcctgatagttccatttccctggggcaaaggaaagggttataaggacaattaagcattagggatgggaatgggaggacaaaagtacctaaggcaaagggaaggatccagggcagcttccacgggactttacgtggcacttggccagatgtgtatctaaagctatgattctgctttgtaactttctagctataatctacctccccaactttcaacaaacacattatgtcaaattctttctgtgtgttataattaaagccaaagagattcttaatatttaccaagtcttaatttcgcttcagagatgtgtttcctagttcagttaaaattggagtttctgttcatgttctccttgttttcagagaagacagagagatgtagacaccgttcatctaccatctcttatcaaacctgaggtccttcagacttatatttttaaggtatcttatatatattttttagtgatatcctttttgctggtctatcctaatttaatatttcttaaagatgtcaaggcctactgtttcttttaaatattttagaatcaaataattattttcttcaattcctcaagagtgtattgatcacctgtaatgtacaagcactgtcagttttgtttttataatgctcaaagttttataatctgggtgaaaaacctagccacatgtataaaatgcttaacagacagcataaggcagcccagaaatatgtgttgaatgaaatgaatagatcggtacaaacaagaatttctctggaaagtcagacaaagaagaaggacagagtggacagtgaaaacttcctgcaggcagagccaggactgggcctttcttcttgttatttcagagacatctgtattttgattatgtctcttttgaattatctattttccagcttggtaacgctgacagggaaataatacatgtcagcattagtttttccaacttaatggatcagatgagagtgatccataacatgtaagctttaggtgtgggctgtaagcaggagagattgcacgataagagcagagcaaaaggttatttagagaggataaattaaaacacttggaattggggtcagtcaatacctggttttgaaatgaatgatgaagatggagttttagaaatgaaatgaatggattgtttagttggcattattaacttaaagaacagggtttagcttaagtattatagggctttacaggagacatttttcaaatttactgagggttttaccagtaagcacttaagcaaatgtaaacattttgtgggctgcaggggagctgtggatattattcatcacccaggcacactagtctagcagacgggtacccagccaggctaaagctctgcagagtttctaagggttgttatgattagtctcttggtgtgtatatattgctaatgtaataagaacataaacattttataagtatagaaatttcttttttttagtgttaaccagtgaagtggcaggaagaacaaatttggcctcaacttaataatagtggtattaatgtagagaacttgttcttaaaataaaactgttctctattaaccatggtatgaagagttcacaaaaactttttgtacatattgtcatgcttagtcattacaatggttgaacaagaggaacgctgctgggattttctgaaagttacactcctttctctcatcatgagaaaaaagaaagcatttgtgactattttcaagcgttgtgagctgtgacagtattcctagggatgaaggattcttctgttctcatctccctttttataatcagaaaatgcccagatattctaataaatatgaatatgaagagttaactgtcatagtaacttagtctatcacttgtagccaattaaaacatacgttttaggagcaaatatcttttactaataatctagggtcattttgcctaatgtctcttcactttgattcctctcttttcccataagacgatgtgaaaagatgggacacaattaaatgctgttttcattggttggtgttagatgagtggaagtcataccatagcgttctctcttttgcatggtttgtaaaggttcctttgggcaccattcttaagttcagagaatataaagatgaatagtgcaaagtcacttcactgaaaaaacacagcataaggggatgggcagccatggcagcagctcatgttagcatgaggtctaagaagtgctgtgagagcttgggaacagacatggagaccaaccatgtggaggggctcaggaaggtgagaacggagagagaaaatgtccttggaggagttttttgatgtctaagctgagtcttagaggatgagtaagagatggccatacaaaagatggagagaagtgtttcagggggcaagggggtcaattctagggcaaaggagctagatgcacagttaattagacacgttcacagaatagatcagagatggcaaaataatggccaatagaccaaatcctgaagaagcattttttgtttggcctgctgtgccaggctggtccttgtagatgtctgcatttgtaaacatggtccctggccaaaggtcctggtcccaaggggcaggtaaggagatggagtaagaggtcagcactatacctccgggtagctgcacgtgcacgcagctgccagtctccaaagcagcagagatggatagttttatttcccagcttcattctttataaattgtgttttatttaagcttttcaaagactctttaaaattcattgaccctatttggtgcaggtgaacaaagctattttttaagtagagtcttataaattaaaaataaggaggcagatcagagaattcaactatctggctcagtcaggagaaaggaaaagtatgtgtctgtcacgtggcaggcattgggtgttatgggatccaggagtaatggagggattcagtagttggtccctgccctcaaggaattagaaaaacatactaagagattggactacaatgctggaaactctgattttcatagctgggacagtaggaatcactcctccttaaaaattccgaagtctttgtacaaattacccttaatttaagatgaattggtgtagcataattcaggggtcaccacgtactcccctctgaataagaaggctgaatctcagtggtcagcaatgagggagattcattttggtatttttttcttttttttttttacaggcaatctttcttctcatccttctagattaacaggattctttcagtcagctttcagaactcattcagcgtagatctggtttgttttcttccttgaaaaaaattattaatataataccacagtctctgcgccgaacatcatgatgcatgcctataatcgcagctactcaggaggctgaggtgggagaatcacttgacaccaagagtttgagcattttttagagatgggaccccatttcttaaaataaataaataaataaataaataaataaataaataaataaataaaaaggtgtctgtgtatgtgaaaccacagtctccacgttctgaatgtaattatgccaaatatattttcttcttatattcttcgcatttcttttaaacatgttttaaaatttaattttcttttaaaataggttttgttttctcattttcttcacaatttccttaagttctgaatttacatcagtcgtctgccactctataatatctataacttgagatatgttcagaaatagaaaactcctaaataagattctggggagacattttcaaaacagttttctgtagaggctttctccagaaactcatttccaagctccaatgtgggatttacgcaggaaattaaattgtcttggtttgattaaggttttgcattttcttttgtttttgaagaaaggatattttattttgtaatttcaaagtcatttattgtggaagaatgaccaagaagtatgaaattaatttttgtctaaactaattacctgcagagctgctcaaaatataaagctttcttgacttaacatttcataggcttctctgagacattacttaacagaaaagccacatttttccaggaagttatttaaaagtcaggtaatttaaattacatttattaagtgcaataaataggcaccaaattaaagcttgtttctctcttattcttaatttctgtagaaaattatactttcgtagagctatgtaggggctgatgtttagtaaacaaaacaatgttatatttaaaaaggagaaaaaaataattcatagaaatgtgtggaccaatttttccccactctcaatccatcagtttcttttctacagtagccttgggcaggaaaggcagaggtagaaaaatctcaagcagtgatgctcagtagaaagacatcttaatttaaaatgtaattcagttttgtatatgagttttgaaataaatcatcattcaaccctcagcatgaaccatgaaccgatttgcatgcgtgagtgaatgaatataaaagaatttttttgttcaagaaaattagtctttttctgaccacccccatcaaatagtgttgtttttcttattcatacatttattctgtgttgttgaaaattagaactttttttacaatattatcacaccctgttcaactctatttcagattgttcttataaaaattcaatccagcaagaatcactcacagagatattaattcctctgttcttaataaaaggccattacagctactgttgcagcagtgcaagagcaccaacgtttaaaaaacatgttttgtatgtgatcaatctagcttttcaatataccactttttgtaatttggtataataaaattaaattgtaagtaaacttaaaattgaagataaaaatagtggtatattcataagtctttataagtctgacaaaataaatcaggggaaacaatttatggcaagtttatcagcccctccctccagctctatttaaataggtccttcctatttaaattattctgtcttatttcatctgttctttcttgtagctgattttacaattggagagttcacggtagttacatgtgtttgtttaaggtctgtcttcctttctagactaaactcttgctgttttgttcactgctgtacagctacacttagcatagtggctatctaggcaatgagaaattttaatgaatgaatgaatgaatgaacaagtcaacactatgtgctcatttaacaagcactttttaagtgctttatttacatcattgtatttaattcttaagacaactctataatacctcccatcttacagatgaagaatctaaggccaacagattaaataatttgctcacgatcacacggctaaacaagtagaaacccaccttccctattgtctttttattgagcctttttacctaagcaagtttgacttgaaagtttcagtcttgccattgaaagagccataatacaccctttcagttgaggaaaccaaggaccagagaggttaaataagttacccacttttaaataactagttaacttcagagtcagaactagaatgcagaccacctgatcctactcagcatgcttagttatgctaccatgaggaaaccagaatatagcactaataataaaaagtattaaagtattttaaaaacatatttcttatgaaaaatcccaacagatggaatagtagagtgagtacagtggaccctcaacatactcatctcccagaatcaacaactatcaagacttttaccacacttgctccatcttgccctttaagtacttttaatgaccaaaacacttgtagctgtatgattaaattaaaacaaagtagatagtgcaggcaagtcagaagtctaaggatatatccaaagttcctctgctaattgataacagagctagttcacagccctctgttcttccactagaacatgccaagagatatataatgaaagacaactgaaagtgggtgacctaaccaggccggccgcagtcagcactggagtggagcggcttatgttggctcagcgtatgtagcttggccagatggggaccagcatcacattggtaatggtatagtagttatcaaatctcagagagcttccagaccacgtggattcctaacaagttcccaggtgatgctgatggtccaggagccacacttagaatcatggtgtggaggatctacccagaaattccaatgaggccctctttcctaaggtaactgagcccagagacacccaagaaggccagcttagcctttcttctcctcatcttgcttctagaaaccagatgtcagagtaacacttgaactggaagcaaactgctaaggaatttaaatgataaaaaggagtaaaaggactaataaaaaaaatatttcacaaaaaatttaaatattgaataaattatgaaaggagaaaactcaggtgtgtatgtgtgtgtgcctgtgtgcgtctccaggcttgggatgctttcaaaaatccatctaggaatgggaagagccgatggtttttgtttttttaatcaaaggctgaatggtatgattaagagaaagagtatatagactaattgacctaaaataacaagaaatcagtctttgacataatagtgtttgagatctctgagatttagctctgaccacattttatgagcactaaggcagaaaatcatagttgtgtttaactgagatgaaaaatgaacactcttttctaacctttttctatctaaaagatagatctcttgattaaaacagctaaatttcaacaacctgaatgtaaccatgatatttaaagatttcatggtaaatcaaacttaataacccacatattatttgatatattctctctttattccaaaaccattattattgcttgtcctctttctacttaacagttccaaagagagtcctttactttttttttactgatgtctcattgtatacaaatattctaaagaaaatcctctagttacccctttatttaacttttttcctctgccttatttcaaacaagagttcaagtaacttgcaaatatatgtaaaatgtgacaaaatagtccagaaaaagaagactaagaagagacaaagtggagccaagaataatagaacttaaagtgaaaaccatgatcaccctcatgtcattagaccaaagagtcgttcagtgggagaggagggcccgctctctgcttctaatgtgctccaccagtgcattttaggaaatctggaagatagattaaagatacaagctagctgaaggctgtttctctcaacgaagcatttgataaaaattatgtggtggtgtgcccacgattcttcttcctttgaaatgcctaacttgagcctctcttgtgaggtgaattaaacaaatgcttgtctctctttgctgacttccacatggcaggcagagtagtccttctaaaaaagcagatctgatcattttcttccactttttaaaatctggaagacttcactgagtctgcatttgcccagaggtctctgtatgtggccttcctaatttctgtgctctcttgacacctcccaccctcattctactctccagatatgtggaacataaacttgccattcttctcctctttggccttctcacacactgttcccactgcctgcaactctcttctccaccctttccgcccatctcccacccatccatcgggtctcagtttacacatcacttcttcctagaaacaccccctgtccaccacccagcataaactaggttaggtgcccctgactgccccgtgttccctgctgtgccacacatgcttgccttggccacgaactgaccaccactacagcatcagtgcccccaggacaaggaccacacctgtcttgctcaccacattatatacagttgtttcgatttcagggaatgcagtattaggctatttgcataatggagtaaactgaaggtgcttttaagcccacaggaagctcctcccaggtgattgcatcccaactcaagactccagccaccccaggccctcagcagacccaggaaagaagaggctcagcaagttgtattacaccagtgtgccccacatacagttgggagactctgggttaaactgatgagccaacaaatgagcctgagtataggtcctgtttccaagttattttacttgctttgagtctcagtttcttattgctaaaatgaggtaacgctatctcagtaaacttgtcttattttaaggttttttttttttaagaaactcaatactgttttttaatctatcctattggcaaattttattttttgttttgctttgtttttaatgtcacagccagtgttgatacaggttctagaagatggtgctctcatatagtgctggtgggagtgtaaacttgtgcaaactctctggagtacagcctgacagtacgtgtcaaaatccctacaacatttgcatatcatctgacttagcagtttcacatctaggaatttatcttcggaatttcttctaaccagagctgtgaacaaaagtctacccataagatatttatcccaacatgctttttgatttttaaaaatggaaaaagactgaatgtctgaaaaaaagtatattggttgaattaattgtggtatatccaaagaataagccactgtgtgttataaatattaatgatgttgatgcaaaaaatatatttaatagcctggggaaattattaagatatattgaaataaatcagggaataaaaccacaatttagcatattctcaattttttttaagtagttatatcattggaaaaaggcagagaagatatcaactagtatgtttctccgaataactcatgaagaatttcttctttgtgattttctagaattgccagttttctgaattggatgtatattacttttgttataaatgttttaggaaaaaatgaaacataacaggaaaataaatttcacacagtttgcatttggagtacctttgcccataacacaagaaagctctgaattccactgattgagggctcctcgtgccagaaggggaaggattccttcaggtgcctggatgctgagagtgatcatggcatcctgggtaaatagcttcattttcgtttgcatggcttgtcagcctacccagttttcattcatgcccttgtgcacactgatttaaacaccaaaattgagccacatcattttctgtgacttcaacaaaggtcagaaactaaacttccacataaaatggcctatctcaataaattaaattcatgtgtgctcttctaaaagggcttttcgtaacactaatgtctctgaatccaactggcctccacagaacttgaagaaggagtaaacaaccttcttcttctttttttttttttttttttgacacaagggccaattcaggaaaaataaaatgtttatcagccacatttttctccctcccaaaataaagctagttttttagagtctcatagggaaaaaaaaaaatctgttcttataagctataaattaccttattggaagaagaacaacattataatatgtgcactgctttttagccatctaaagtttcctttctgggtatataggagatgtaacaacacagaggtatctttgtaatctttcatctggaaaatcatattgtgtgccatgttgggaagatagatggttccaggtcatatgatgtatgagggaacttcaaaaagattatggaaaaaatagaattaaaagataaaaattaaaaaaaaaaaactatttctcaacctaatctccatcaaggtcaagacactttggtaagcagtgataccagccatttagtctatctgtaaagaactcacagagtcctgggaatttaaccatgtcaaagcattcttttttacattattaactgaagagaaatggattccctttaaagactttttaagattaggaaacaaaaagaaggcagagggagccaaatcaggactgtgaagtggatgcctaatgatttcccatccaaatgctcacaaggttgcccgtgtttgatgagaggaatgagcaggagcattattgtggtggagaagaactctctggggaagctttctgctaaagctttgctaatttttttcaaaacactctcataataagtagatgttattgttctttagccttctggaaaggaatcaagcaaaatgccttcagcatcccaaaaaactatggccatgagctttgctcttgatctgtccactttttctttgactggaccactcccacctcttggtagccactgctttgattgtctttgtgttcaggattgtagtggtaaagccatgtttcacctcctgttatatattcattttcttctttttttttttttttttgaagaaatgcctcaggatcttgatcccatttgtttaaaatttccattgaaagccctgctcttgtctgcagccaatctgagtacaatggttttggcacccactgagtggaaagttagctcaactttaatttttcaatcagaattgtgtgagctaaaccaattgagacgtctatggtattggttgttgtttctactgttaaccattggtccacttaaatcagggcatgaaaaagattcattttttcctcacaaattgatgtggatggtttgcagctgtggactttaatcttcaacatcatctgttcttaaacaagttatccatttgtaaactgctgatttgggggggacattgtccccataaacttcttgtaaagcatcaatgatttcactattcttccatccaagtgttagcataaatttgatatttgttcttgcttctgttttagcagaattcatgttgctttgataagggctcttttcaaactgatgtcttatcctccttaatgcctcaatctagatcctgttcagacatgttataacaagttagtatgagtttattttggtgcaaaaaatttttgaaatccatgcatagtcttttcagaatatgcattttccatgaactttttgaagtccccttgtatacctccaccttagagaaatgtgtttcagcagttggtgagggatacagttgaggaacaaataggaaacagagggatggaagagataaaggcaaggaatgtgtgtggtccactccatcaggatgcttggctttgaagagtgttgaagcaagaggggtattaccttgggggaaatatgaagaaagtaatttatttgatgcaggaagttaatagacagtagagatagaagataaaagacagattagggaggagattaaataaaaacaaaagtggagggtttatctttaaaaggaatgaagacagcctcttctgaaatgggaggaaggaagtaaatctgagggcatttgtcactgttgtataagagggaagggcatctgttaaggcgtcttgggagctagagtgaacctagagccttgagaaggcaggagaagagttaaaatagtcactataaggaacgaaaatggaaatcagccctggctaagcacccgcactgttaaaccatccccttgaaatggggccagttagtatgagtgtaagcctttcccagcaggagcagagacagtaggttattgagcagatccagggtgggaatgttggatggacaaggcagaatggattattgagggtgcctgagtgagtattgtggaagtaactgaccacagggttcagaagagatggcccaggaacaggtgggtggaaatgccacctcaaggcagaatgtgcactcagaagtctctcagctgtaatttatggttcttctgtcacaagcaccttgacagcaacataccccttatattttctcattttccatcaaaattctcattctgttgggtcactctttgggcacagaggctgcaggccaggtaggaaagagtcagtgctggcccctatagcagagtggtagagtggtggccagaattctccatcaagtcacttctagctttcatattctgttgccctgacttcattccgtactgtagttccagctgctgggctctcctctggcaccctcccggctaaattctaactcgtcataattctacaagttagtctttttcctagaagggccctctcatagatacaggccctctctcctgccataggaacactgcaaccctgtgcatagaagggtatcatctcacatgtgtgcacatagggtaaagtctgcctctctagggagttggctgtttttaaaaccagagcactctagaagctgcacactggtgactcttgcttgctaagaaacgtgttgtggaatctgtaatccagcagggtcactgaacactacacaaacatatcttactcagaagtggaattatggcttctgctaggagaaggcaggcttgagtaacctccttaggtttctcaagaaagaataaataaacatgcatataagcaggaactagtagatccaatttatctagactctcaaaaagcctttcacaagattctatacaaagtctacttttagaagttggctcttttgagaaacaggcttataataatcattatcattgtagagttttagatgatgggtttcatttgcataaataacactgtgcgacctccccttgaaaatcccgtgtgcataagtcacgttacagcactggtactacacaacagccacccggtgtttactgttgtcaggaaccggtagcatgctgagcctgtaattcattacagacgttgtaatgatggcagtcagaggcacttcattgctactcatgatcactaattaagtgatgtcttaataaagtataaatacaggggaagaacagcttccagaattcaggtagtattttctgcccaatcttccaatattgtgtttgaagtggtttgttcatgactaaatataaaatggaacactgtgcaggaggcattgtctcagtcagtcttcaaccctaggaggaaaagatgatcatttctcttgtagagaggagtaagtgaaacctagctgccctatagccaggaagggacagaacctatatgaatccagaacactctaatcctgactctcttaaccactttactcttagctagcaaaatcaagaagagcagccagagctcccacaaacatattctttcttattataagtttgtttcataaagaggattccccatatccaggaatcagccagatcagtactgcctctactggataggtggattatttgtactttgtcagtgccgattttaggtagtgtgattgagttgagttggagatgatcactccaggttctctgctctttttccagcccattgctagctgtgtcctttgccacttgttgtgctgttccgggagttgccattctgaccttgggggtgaatccactcacaggagccctggggctcttcaacattttcctgtatacctgctgctacacaccactgaaaaggatcagcattgccaacacatgggtcggagctgtggttggggccatcccgcctgtcatgggctggacagcggccacgggcagcctcgatgctggtaagtgtcccgcgatgtggagtctcatatgagcacactcggtcaaggaggcatttcctccctgagctgtagcacttggttcgattccattccatcccacattaattcttttagcaaatgtgctgatgtggcagactgaaattttgtggacgcagagtaaagagagaccgtgtcatcctggctggtgggtgcacatgacatacactttcccttatagggaatgtctgggagaaaaaaaaggaagcagtgctgcctacctgtgactacaggtggataaagaaagtacctgaagctatgatgaaaatcacaaacgaagctaggactaacgaattcatggggcggggagaaggtatctggagctggcctccagtctcccatcaaaggggtttcgtctcacgagccagcctcctgtgttcccctcttatgaaagggcagattattttcattagtttctaatttatttttatatgatttgcttaaatcgttcatactgtctatagtaaaactattgaaagattcctacatttttttggtggtatgtcacaactaaatttgtggggtgaaaatagctcatttttaccatgtgtaagggaagtttcacagtctaattagtcaagtaattagtgtttttgaccgacacttaggaaggaagtggtgaggtttcctgcaatatatgtaagtacatatttttcacatgagagatcaaaaggcagttgaccataaaccgttaccctgtaagccacatttctgaaacttttcataaaagctcttacactccaatttggcaagcttacaaatgcgattacacctttaccatgattgtctcttagaatggttttaatatcctgtaaatgtcagattttaatgaatctacgaataccatattctaaaacgtatgtgcttgtgtgttctgtgataaacctaaaaccagagccccatccatgtgggaggcagtgtcagcaaagcggtggtgagcaaggaagccggcggcgctgcctggatggggagcccgaccccaccgctcatgagctgtgcatccttcgcagctgaactcagcctctttctgccactgtctcctcatctcccacatggggctaataatcttctcccctcctggagtcattgtgaggatgaaacaaattgttatttgtaaggtgctggaccatggtgagggctcaatttgggatctgtatgctgttgttatcattcaggagtcctccttcatacagtggagggactggcacagatcaggaaatggaagattttgtttggtttgtaagctgagcgatgcagccttgtcctctggctgttattttgaagactgaggcgcctgcagcctggtgggaaagagtgctggggtcctttggtgaggtttgcagtggatgagggaagggagggtttaaagcctgggcttggcatccctgggctagatgacatctgcgtgttcatcctggtttatagttgaccttcacagagcacacctgcacaccaccagccctcctgctcccggtcacgttcctcttccttagttccacctggagctcacctgacttgaccccaattccctctcccccttaacgcaactgtcctcttccctcttatttccctcaaacctttatagtgattgtgcagacatttgaggtggagaccatgaaagacagtgtgggacttcctaggctgtgcatggggagtatcccccttcctcaagggtgtagccccacttcagcacttgggtccctgcactgagccacctgcctgtctgatggagacacccccatccctggcaggggtgcctgaactctattcaacttcctcaaacctggcaccaagcaacaagaaccttctctttctgggaagacccagacagggccagagtcagggccaagtattacagccttagggacaggtagtacaggagactggtatgggcagttcagtcccaggccatggagaacttggtcaccactgttgtgcagtgttgtcctagggcccaggttcttgctgagggctagaggcccttgtcacacttccgggcagtttcctcctgaagagagcctcagcatgtgcaggctggagttgcctccccggaggctagagaaaaagagcttttcaaaagtcctcacttaagagtgcacattcagacaagagcccttatttgtttaaggatagtctggatttggctaaactgctaatagtcatgtttaaaataattttttttcttttgagatggcgtctcgctctgtcgcccaggctggagtgcagtggtgcgatctcggctcactgcaacctccgcttcctgggttcaagcgattctcctgcttcagcctcctgcatagctgggactacaggcgcccgccaccacgcccagctaatttttatatttttaatagagacggggtttcaccatattggccaggatggtctctatctcttgacctcgtgatccgcctgcctcggcctcccaaagtgctgggattacaggcgtgagccaccgcgcctggcctaaaataaattttttaatgttgattatagtctttctataatacagatttaatcatttgtatacaaactcattaatgatggacagctaagggcagctcatcccttgtttaggtagcagaatgaaagtacgtatttgtcttggaaaatgagaccccttttctaccccaacagaacctggtataaaacagagcagtctgaaagacatgtataaccacaaagagaagttcccttggcagtttttgaggttggcttctattacagtgtatccttttactttaaatcttaaagatgcattgtggggcacacagtaacaacatgacttactgcccccagaatcccagttaattgcagatcaaaccatatgcttaaagccttgtcaagattatacagaaagaatactactagtttacataatgctttaaactacttcaaaaaagtttccaaacattaatttgatagaaccaacttgagataagcagcaaatacttaattgaatgaacaaatgagtgaacataggtaccttctattttacaggtgatagaatctaagagaatgtatttttaaacagatttttattgctgggattttaggaactgggttgaatatggtcttatattgctaagtcatcttctagagctgtactgtcttgtgtggtagccactaggctcaagtggctatttaaatttaaatttatactaaactttaaaattcagttacccagtcccattagccatatttcaaacgcgcaaaggcacatgtacctagtagttacactatcaacagcacagatgtaaaacatttccattattgcagaatgttcacttagaccgtactgcctgggtggaaaggttgatgtccttatgaatctatatttcatcatcctcacatgaatatgtacatcaaataatgagactgtacctgtggtctcactaaagtctaaaacagtggtttgcaaacttcagagaacatgataattacctggagagcttactaacacaaagattcctgggccctacccctggaacttctgattcagtgggctggggtggggtctgagaatttttatttctaacaagtttctagttgctgctgatgcccctggtccagggaccacactttaagaaccaccagtttgcaaagacagaaccagacagagctctagccattagaatatcttgaaaatacctggagattaggacataggcagatggtattatttgagatgtactaatggtgtcatttatattattcacagaggggatatctctcatctgggtttttatcttaggggacatgtatagttataaagagcccttctgagaaaaaaaaaatggccaaaaaggtttcccgtcttctgtggtattgccaagcacttaatctttgagcccccaaagatggatcactttagatcaccacctttataaactggtccccataattgcttcatcatgcaagtgtcaactggggacctactgtttgccaggcatcgagagacacaaacataactaaaacccagtgagtgccctcaggaaatcacgtctcagggtctttggggagaggcaggcaggtaatcaaatgattgagtgatctaagagctttagcagggtatcttcagagggctgtgggctctcttaacttaccccaaactggtcccagatgactttggagaagaaagtctacagaattaagtcatgaccagtttctttgaggagggaatatgctttccaggaagagggaagagcctgtacaaaggcttacaggcctgaaagccagtctagagtggggtggggacacgtgcaaggatgagccacctgcagaggaagtcatagttcattcagtggtgagaaagacccactggagcttgaggcagcataacagcagggtcatacatttaggatcatttaccagtgtgctgcaggttctccaagatattggaaagtcagtaaattgcagaagcctgcctttattgtccttccaagcctgtgtgcctcctctcacctactacttcccctcctccacttccttctctctccactagggctccacctaccctagacctgctccctcccacactctctttgccctccctagttaatttaacagtttgccttttaagtagtgaagcatcaatctgatcatcctttgaagacgcagcttgttaacaccagtgaccctccaagcggggaaatggatgaaggatacatgtttgaagggaggcaggttgcacggaacatattcccttctgagccaagacatcaaatacccagcaccaaccctttagtcacccagtcaccttgactgaggatacttttgcaaaagcccttcctggggctcagtagatggtagtcaagatggagaggaagccgctgagccaagatttgaaatggaaatcctgcagcctcatatattgaaggcccaatatattttggaggagagagatttaaagattggtagctatagaaaacactgtgcatttgaggcagcccatgggtcagagtgctccaccaagcaaggaaatgcagtatgtcgggaagtaccttttcccctttgtggtgtctggctcattttgtgctttttgtggtggctacagggccagattaagaattccagggggccttgagcactgaagagattgtgatgcctcctctcttcctgcaaagacataaaacataaaataactctaaggatgttccatgggattctgattttttttccccccacaactactttgactttttaaaaatcagatagtgtaaaagaacttctaattgttctagatgcccggtgagaggtgtgggtcccacataggtgtctgaccggcccacttcgggaatccagcatggggtaagtgaggtaggatggcagggtgaagaaaatgacacagatgagcagatggatgttgtgaaagctaagcaaatgtgaattgttcttgatgtttgctattttataactgcacaatgaactgtaagcagctcagcttttctccccgtcacagtgccaacggctttcagtccagtgcttgctacagagagtgctgtgccgcaaagcatgggcccagcccagagagtgctctttgtggttgttctgtcagggtagtcaggactctgcggcccagctgcttctgtgcacaggaaataacttcattttacaaagccctctgtctataaaggtaatcattataatgggattttacttgtgtccattttcctctcagcctcagagttaggccttttcctctcacctgcctaattaccttatcttaatttttttttaattcagcctaactgctgttagcaaaaaccattaaaaatgcttcctagctaagattcaggaaaggcagaatgagagggttgctttctggcccctggtctagccagcttgttgtcacaggaactgccgcacttggtttgattctgcacacagggaatggcaatgacagaagtgacctgctggagccgcggtgaaggagtccactctgaggaggtaggggagggaggggactgcagataagtgcccagccgacattccagctgcaagcgggcctggagccacacgcattaggcctctcaacagtgtttatctccagagactattagtgtatctcagaggctttgggttaaatctgctccccctccttcttgccaaggccccctcttttcatcactccaatatcttagaaaggttcagattatttttcctcattttcctaaatttgaataagtcccatgtttcgggagtgtatggattgggccttcgtaatgaccatcttgtagagtggatttgcagttgcctttggcttgtgattcaaatgtgtgttaagcattaattatgtcacccaacatttagttacaaatgaggactcagaaatgggatcttatcaggaagtgacatttggcagatggatggttttagtaacaaaaagagaatgagatttttttaccctcagctggtaaactacaaaatgttcagttctgtttcactttatttacctcccttattcctggatgagaaagtagagtcggagtgaatttattcactcacccattcaacaaatatttattgagggcttactaagtaccaggtactgtttaacccaagcacttaatgatttcctttataacgctgcctcggtttgaaaccaagcttgaaaatgagtatctgtgtctgtgttcactttgtataagattttaccataactagttttagcactccagattaagttatactagcgttggagctccagattaagctaaatgatagttttaaagacaaaataaacaaggaacattttcatgggaatattagcaaacaaacaatatttagaacactatattctcttgaaagaccaaaaaaaaaaaaagagctacgaaagaacgtactagaaattatgttgcaagcccccagattggtggtataattggaggcaaactggtactaagggcactgaggtcttgtcagttgtgctgtgttgaccataattgatcacaagcttttagggagctgggccagtgccttcctgaatgaacgatagatgacggtgtgccagcctctggtagacatggtgcctggagcagagtgcacgtgtaactagtattcttcagtgaattaatatttaagtgataaagatggaaagaccttccaatatgagctaagggagtaggaagcatttgaatttcagagagaattcacaggtgcttgaaacatccttccaaggaaatggcaagaagagaaaaaggggagcactgttttcagagtcagagctttttgcttcctttactcccatctttctctctaagtgaaacctcctcatgactctgcctggagggcggcagcacacaatgaggtgaaggagaggagagaatccagctccctcccgcccactgagcctctccattattcctaaactactagcaaagaattcttcaagggcaagcagttattgcccactctatttcctattttcaggggacttttaatcttcccttttgtcgcctgtgcagttgataaactggccccacatcctcttccctttatctgcagcaccatagaagtctattgcactgttgaagctgatctgtttcacaagctcctttgtgttgcccctcaaaagaaaggctttgaaatctgtgaccatgaagctctgggtttggctttgcttccccagctagcccccagtctacataaccacataaccctaaaagcacaaatagagccagtcatggagcagacgcgctaccgtgggccacatcagagaggagactattgtactggcgagggaagacctcccaaacccagcaccaaggttcactggagctagggttctttatcctttgcaaggccatgcgtggatggtgagtgacaatgggtttggggggtgggggtgggaaggtgcccactgggcagtgagagaaaacaagccgaaaccgatgaactccattccacaaggaatttcctgacagagtcagagctccagcttgaggatttttgtctccattccattcagataccatttagctggaattgccttagttttgtcagcaaagtgatggaggtgtgctgtggacaagagcatttctggacaatgtgcagaggtggaaatgattgcgattctcctccagtctgtatgttgtagaatgtttgatagatgcttcgagagaatataaaaatacatagcattttcaacgagtcatcaggaagacattaatgagccttgccccacctaatacagccctctaatcagagccaggtgccactggatgggggttccctccagctgttcttacatacagtacagcagatgtgcccttctccattttctgaggaaggagggaagtaacgatgccctgcacacctggacattctatggagttgcctttgcagtgggatttcagctccatgctctcaggaagctgccgtgctctggagagccatgtctacagatatgccacctagattttcagaattttctatgttcacagactagcaagtatttgattaacagaagagaagtggacatttctttcaaacatgattaaaccaaatgtgtacaaagattgtgcagggttaggtaggaaaatgggaagatacagttaaaagaagtcgaaaacacgtggtttgtttgaatggattgaaactcagagaccaattttagatctcagtttacaaattacttcttccaggaagccttccctgacctctcaaggctgaattaagtgttctcctgccctgcactaagtaacattcaccatgggctgtaatccctttgtgttgtctttcttcctggccagacacgagcagaggactttgaaaacagactgtgcctatctctaggggcacacagtccagatttgttgtcatagatgacagacccaataaaaatggactgctttaggagcttgaggcagaggagatgagtagaatacttatcttgaaggaaggtgaggtctttgaattagtcaactgagtgctttatgtttactccacaaggaaggtgggttccaccacagccccggcactaattcaagtcttcctgttctagttcaccttatcttgatgaagaaagtaatttgttttcatcttttataggaggagaggcagttgaagcatatcaagtaaagccgtgtgtgggtggtggttttctgattacaatccattaaggctaggctgtgatttccaaacctccttcatttgtgacatgagccaaacccacacccaatttcctcttacagaaaacagcatgctactctcaggaaaatgatttctttaattatgtttattttaagcagaagcattactgaaaaaagtgtattgagcaaaacaaaatacttcggttgacacacacaaaaaaggagggcttttgagaaagacaaggaaaatctcacatttggagctggtattttagccattttcccagctgaggttgctctttctgagccatttctagagcaaagcagacactgagctctgaatgatccaattccttcccccatttctaagttatcactgatgttgtttttcttgaaagacacttcccccgtgcttgtggctgtcataactgcaaactctttgaatctgagacagctcgtgagctggggctgggcttctctgtacctcgtgttcaaagtctcagcgtgaccccacgccccaagactctgacaacgcttcctcttaccagtcactttaaaatccagaggtcactttatttaccatcaaaatataaagaagtctacttgcatcaccctgtttactccgtcagttgcacctgagcattccaacctttcctctgtcctttttaattccctagcagtactcactgccaagaaaaaatgccttctagttgatagttttgtcattaaaacagatctctctctttttttttttttaaggtactagaaaatgcttctgcaattttttctttcagcaagccttcctctacccagagcacccaacagtccactgatgtgggaatgtcacaaactttagtctgtgtgtggcaacaactttttttttttttttttaagaattgatgtcttgctctgtcacccaggctggagtacggtggtgcagtcatagttcaatgcagcctagaactcccaggctcaagcgatcctccctcctcagactcccaagtaggccggactataggcacgtggcaccttgcctaattttttgtagagatggggtcttgctgtgttgccccagataaccaaccacattctaacagaaggtgctaatatcttgtgccagtagtgctgaatatcatcaggcaaattaatctttctcatctataagatgatgatgatgatacctataggcggggttgttgtaaggattcgaaagcatatgtgtaactgcctggcacgtaaaagccacaggcatttcaactgagatgtctgttatgtacctgaaacttaaaatagtcaaaagtaaaaccgttcgtgtctctaccgtgagcacactcagcagtgtctatcctagggttccccacctgagtaacccccctctgccaccccctctgtctctcgacccccagcctgttcccccctgcgctgggggaagatcccactccttatcttgatttccagatgccttcccagccccatcttgtaactctcccttcctcactccagcctccatgctgtctcagaggcctactgggacctttcccagcatccagtagagttctccttgccattagttgagtcatggcttaaatgtcacctatggaaaggccttccctgagcactcagtctcaagtcacccgcattgcattaccctgttttgagtcgtctcaaaataggcatcagcactgttacttgtgtttatgtccatctccctctagactttaagcaggacttgattgccactgcctttctagcacccagaattgtgcctacatgtgagacacctgtcatctgtttaccaggttaatggattcaatgaataatagctgctcatattatcagcattaaaattgagtgtgtttgcatgagctaagatttatacatatataaattttatatatatatgtataaaatttaaagttaaaaatgaatttgggggatttgacagtaaccctactgaaatagggaccctaaaatcaggtctttgttatatttcctcccatactggaagactgaaaaggggttgactgacttatggaagccacagaaaactattcatggatataaaaggaggccctcatccctcttaaaccatctgtacccacacaaattccgcttgataagctacaactgccccgtctgataaacgtaactcagaaatgattaagtttctccccagaacaatgtgcattaaaaatcctcctcctttcttttagatgacttgcaaagcctgcccctagtgtcactctgcactctgtgctgttgaggaatacagatcagagattaaaggaggagctggttccttctcatgctcactgtcatttgcacaaactggggcccctcagtggcttatagccccagacttattttctgaagtattctgcattatgtaaagtgctctgtctcctggtgagttctgcctagcagtagcccccagctccctttttctgaacattcccacagaccagggacttaaaagatcctcattacctgaaataggactgtggttacaaattctcaacctcttctctccctgggcaggatggtgctttccagggcagatgacacagagggttggtgaactctcagttctctgccagggaccccatggagaaggtggttccagaggaggggaaggagaagatagacagaatcctgtagtttgcctgactggttcccaagccggtgttgggaaacagtgatcttggggataacttaattggctcccttgatgagtttgggcgcactttactacaatatcattacatactttctgtgttctaatgcctggagattcacgggaaagtgaacataccctaagaagttcacctcaggtaggaaatgcagacacgtaaatgtctgcctggaccctgtggcttgctcaggaaaagacgctcacagttgcttatcacagacgacacccacactctggctgccacaccctcttagtgactttccccttggatgtcccaaaggcatctcagactgaacacacccaaggtcacactaatgacctcctctccccttcttccctgcttgtctcagtaagtggcatctgtatggatccataagcccaggatccataagcccaggacttgctattgatacctcctccctctctcctcccctccttatttacactgcacgcacatcctgtcccttttgcctcccaaattccttccaaatttatcttctttgcaactctactgtcaccatcctgatcctaagtactgtcatccttcatcccctcactccttatctcctgattggtccttccataccttctttaggcccctccagtgtatccttcacaaatagtatcacttagcactggtgcccctcccctcaccccctacacacataggtgcacacactcacacagaggtacacatacacgcaggcacacatgctcagcactcttatacgttaagatcctctgtggctttctgttgcttttagaatagcaaagtcaaggctgagtgcagtggctcatgcctgtaatctctgtactttgagaggctgaggcaggaggattgcttggggccaggagttcaaggccagcctgggcaacatggtgagaccccatctctacaaaaagttgttttaaaaagttttctgagtttggtgacgtgcacctatagtgccagctattcaggaggctgaggcaggaggatgacttgagcccaagagatcgaggctgcagtgagctgagactgtgccactgcactccagccaaccttgtcctgaggaactttccctgtcattctcagcactccagccaaaccacaccaccttcctttttttttaatcatgcaataaaattgactttttaaatatatatagttctgtgactcctaacacgtgttaatcttcttttttacaccgcccacacctcaaaccttccagccccaaggcctttatgaatactgtcccctccaccagccctgacttgacaaagtcaccactctctccagctcagctgagacatcccttcctcagagaagccacctctggtcccctagactcagtcagctcctcttatgtgtcttcactgcaccatgcacttttcctcactgcatttggagtggtgactttagagtcactagtgtggctcttgatgtctacctccttgactgaagggtctgctcggtgcaggcaggagcacgtgtggattgttgctcgccatggtatccccagtgcctagcacggtgcttaccccatagtaggcgcccggggagcattttttgcgcgagtactcagtcacctgcacaggaataaccagcccctgccttccagcccccaccctactgcctgtccttaggtggcttcgtgcatgtcatagaaggaccctggcctgaaaatcaagcagccttgttttgaattgctcttccgtctctttttggagaacttggcattgcctaattttttttttcactgaagtttataaatctacctcaaaatccaatggtcaagattaaatggggcaaactatgagagtagggtctgtcacataataggagctcagcgagcagcagccttcattccacccatgtgggtgctggggagactgttccagagaaaggggcaaaatggtgctcagggtgttatgtccttgttgaaaaattacaaagccatagacaagttatcattgtactctgggaccgttttgtccttgtgactcattttatttaacacatgtggttttgacacctcccgcttgtgccattgtgccaggctctgggggatggtgagaggaatgtggcaggcttgtgccctggaagccctggtgaaagaggtaaacagatcagagccagggtgtgacgcacccgcctgcaggtacatccggctctgtgtcagtgctgagccaggagcactgactgccctggaaagggagccagggctcacagaacaggcggagcggacttgcagcgtcctccaggttacagcactgcttccacctgcctgaagccacacacccgggtcccagcgggcggaaatggagctcagcgctccagcacaatggttgcacccagaggtagtactgaagtagatactgaattccctacaagtgtttgcccgtgtgtaggggcttctttgctccccacaatgtggggaggtgtgaggagcatcaggtgggcaggagccagcgatggtaagcgtcctgcagcgcaggcagcccccctgtgaagcagggtctgagccagaccccacagcctcctgcccccaggcacactggcacccccaggtgagaaaggagggatcttagctcatcggctgccccaccagcctgatgtaggcacctgtctcccagccaccctgtgatgtaggcaggcagcgatgagagcacagggtggcagagcttctgaggtgccaggcaggctctcccaggagaggaaaccattctttggaaatctctggtgatgactgcctttgtctccctctccttccctgacccccgcacaggcgcatttctcctgggaggaatcctctactcctggcagtttcctcatttcaacgccctgagctggggcctccgtgaagactactcccggggcggctactgcatgatgtcggtcacccacccgggcctgtgccggcgcgtggcgctgcgccactgcctggccctgctcgtgctgtccgcagcagcccctgtgctggacatcaccacatggaccttccccatcatggcccttcccatcaatgcgtacatctcctacctcggcttccgcttctacgtggacgcagaccgcaggagctcgcggagactgttcttctgcagcctgtggcacctgccgctgctgctgctgctcatgctcacctgcaagcggccgagcggaggcggggacgcagggccccctcccagctgagagcactgggacgcccaccgcccctttccctccgctgccaggcgagcatgttgtggtaattctggaacacaagaagagaaattgctgggtttagaacaagattataaacgaattcggtgctcagtgatcacttgacagttttttttttttttaaatattacccaaaatgctccccaaataagaaatgcatcagctcagtcagtgaatacaaaaaaggaattatttttccctttgagggtctttatacatctctcctccaaccccaccctctattctgtttcttcctcctcacatgggggtacacatacacagcttcctcttttggttccatccttaccaccacaccacacgcacactccacatgcccagcagagtggcacttggtggccagaaagtgtgagcctcatgatctgctgtctgtagttctgtgagctcaggtccctcaaaggcctcggagcacccccttcctggtgactgagccagggcctgcatttttggttttccccaccccacacattctcaaccatagtccttctaacaataccaatagctaggacccggctgctgtgcactgggactggggattccacatgtttgccttgggagtctcaagctggactgccagcccctgtcctcccttcacccccattgcgtatgagcatttcagaactccaaggagtcacaggcatctttatagttcacgttaacatatagacactgttggaagcagttccttctaaaagggtagccctggacttaataccagccggatacctctggcccccaccccattactgtacctctggagtcactactgtgggtcgccactcctctgctacacagcacggctttttcaaggctgtattgagaagggaagttaggaagaagggtgtgctgggctaaccagcccacagagctcacattcctgtcccttgggtgaaaaatacatgtccatcctgatatctcctgaattcagaaattagcctccacatgtgcaatggctttaagagccagaagcagggttctgggaattttgcaagttatcctgtggccaggtgtggtctcggttaccaaatacggttacctgcagctttttagtcctttgtgctcccacgggtctgcagagtcccatctgcccaaaggtcttgaagcttgacaggatgttttcattactcagtctcccagggcactgctggtccgtagggattcattggtcggggtgggagagttaaacaacatttaaacagagttctctcaaaaatgtctaaagggattgtaggtagataacatccaatcactgtttgcacttatctgaaatcttccctcttggctgcccccaggtatttactgtggagaacattgcataggaatgtctggaaaaagcctctacaacttgttacagccttcacatttgtacaattcattgattctcttttccttccacaataaaatggtatacaagaacaggagtgtgtgtgacgtcattggaagtaatcatcctgtgctgagttcgcacagttcttggtagaaccgacacttgatcacgccttcaagagctggcagagggtgcgtgggaggttggttttgtttcgtaaattgacaaattgtagttgtgtatatttatgaggtaataaagtgatgttatgatttatgaagacaattgaaataatgaaatcaagctgatgaatgtattcattacctcagatacttatttttgtgataagaacatttttaatgtactcagtaattttgaaattagaatacattatttcctgcattcacacagtgtgtgatgtacgtcaaagggaggagacgtactcatcataactgactttgtaccctttcaccatcttgtacccattccgttcaactcccagcctctctaaccaccattctactctctgcttcaagtctgattattctggattccacatagaagtaagaacatgcagtatttatctttctgtgccatattaagttgagaactttaaccttttcgcttaagagcagcaccttctggcttctctgacatctctggattgccagcatcactatgtgaggccatgattaagcaaaataaagcttactgagcacaagctctgcaatgccaccacagttggatttgataaccgagatggctgctaagtgactcatgggtgggacagtattcagcatggatctgctggacaaagagataattcaggtcccaagcaggtgacgctagattgcatcacactaagtacgccacacaatctgaaacttatgaaatgtttatttctgtcattttctatttagtatctttggaccttggttgaccatgggtaactgaaacagtggaaagagaaaccacagataagggagaactgctgtacatatctgccagcctggagaaatgagagcaatatacctgcttcttgtttgttggaaacccaaatgtaattgacctgctggacacattacactttttggcatcttttggccactatttcctaattgtaagatgtgaagatacgctctggatcaaagaggctctcatgttcgcttaataattcagagtccatcactcagtggctggactctgccatgcacatcacagagcatctgagaggcaaggtatccaccagcgtgggacaactctatgcttgcattctgatcatgcctcactcctcacacttcagcttgtgtgatgccaccagtttgagccctctgaaaatcccatctgaccactgctaacctcctctaccaccaccaggttggttgaaccaagcatctatccgagacacatgcctgcaagacatgcctgcagtttattttcctctttgccccagccttgtctgtttttctcatggcagccagcatgatccctctaagctaccaggcagatcctgccattcccattctccaccctgtagttgctttcctacctggtcccatgccatctggtcctgctcccatctctgatcttggaaataccttcttgccacacctactaccctgcccacagatctccacgcttttcttcaatactcaggcacacccgctgtggggtattcatattaatacctcctgttccctctatgtggggtcctctcatttcattgagaggacacctccttagagagggcttttttggccactttatcaaatagctcccctgtccccacctccttgctgtgctttgctttttttttttttttttttttttttttttttttttttttttttttgagatggagtctcgttctattgcccaggctggaatgcaatggtgcgatctcggctcactgcaacctccgcatcccgggttcaagcgattctcctgcctcagcctccagagtagctgggattacaggtaccatcacacccgggtaattttgtattttagtagagatggggtttcaccatgttggtcaggctggtctccaactcctgacctcaattaacactatttcatgttctatgtctatttacatatctcattatttaatgtctgtcttccctgcagtataagttccatgaaggcaaggactgtatctttgcattgctttatctccaacttctagaacaatgcttagcacagagtaggcactcaataaatgcttcttcctgaataaataaaagaataaccccgtctgggttatatgaggtccctgtggtcagagagaaacggcctgttagcctgggataaagaatgaatggatttggaaaggtattgatgacctgtggttccatgagaaaagatggcttctgtatagtccttatctggctggtgcaatcactgttcccactcccgacttcaggactctgtccccaggctgcactaaccagaatgcactccactgcctccaggccaccaccccactgcttctacttgtttctggaattgccttttctaacttcaaacttccaccccccctccactgccactgtcattcctgacatattcatttcccatagcacctattaatatgtgacatacacatttcacttacttgttattgactaccgactaccacccctgaaccgtaaactcagtagggcagaaatgtctgtttctcactgctgtctccacaggcacctacaacagaagacaatccataaatgaccatgtgatgggtgctccatcaatgatgaaaggaatgaatgagtaccttttatggcatggtgggaggtggaggtggcgggagcacttgaaggtggaggagattggtacatgcctgccccttgtgactgaatctggaacaggtgcacgtttctgcctgcttcgtgaagcaaactgccaaagtcgaaccaaggcaagtgactatttcttcctagtttgactcatcaattctcatcattttctgtatcttcaggggtaccttgacttaactacttggtaacagagttttcagcccagtaaattaagttggattcttgaccaatatttttactttttaaatgcattagcagagaatctagtgtctgtctccatcttcatccctcatcatctgctgcgaaaggctttgctttaactcattcccaccagataggagctcaggcttcacctcctgagcaccagcatcatgcatccaggccactgtaaatgagggaaccattcccggtttataaattggggacctgcctgtgaagtagaagccaagacaataaggactcccagttgcagagacggtcaagagggcaggtgggccccattcagggaacgagggtgcggttccagggtcgtgggaaaagcctgtctttcctcacaagccggcagccagggggcgctgcaggctggggcgctgtgaagctgctgttggctgagggctccccactcagcaaagcggggccagagccggggattcaggagagagcggggcgacgaccgcacagcacacagtgggcgaggcaaagcaaagttcttggttgagtaaccgcaccccacccaaccccaaacgtccaaagagaggcaaggtgaccaaggcaatctggagaagataagccacacacaccagacaagctccccggccctccccagcttcaacaaacacggaaagcaaggagccaagaaccaaaacagagacccactgagaggagagccaccttccgcccagcagccagctttcctgtgcccactgagcacgagattatgtgtgaggcctcgtgtcggggagcgagatgcacccgaatattcccagcccccggcagctcactccggagatttcctagagaggcaatgcagccatgaggtgggagtagaaggagccttcccctccccaccacgccccgcctccaaaccccgttcctaacctagaatcctccaacctcgcctgtgacactctcaggacccgccacctgactcggggctgcctttgtgcagcctggctgggggcttctcaacatccgcttctccatgatcctggctcttgtgtcccttgatctggctctcagggtccttcgttccgggctccatctctgtcacagggctggtctggccataggccctgactctataaggggacttgagccaaaccgagcactcaacccagcccatggctctttttttttttttttttaatgggatagtctagcctctacgcatcaccgcagttgtgtttctgtgtctcaaaggaaatagttcagcataggcgattggtcattaggccaaacactactagggagtgtggagaggagagaaggcacttcaagcagagagcagggtgagcaaaggcccagggtgaaggggcatcgagtgtttggggagcattcgcagttctgcatggctggagggtaggggccaggaagagctggaggatgacgttgaagacagaagcggagggaccaggtctggccaactttatgtttgcccaactaagtcacctggattttaccctaagggcaatagggagccattgaagagtaaagctggaaagtagcatgatcatgtttgtgctttagaaagaaaatccaggccacagagcagaaggtggatgggaagaactgggaagaccaggggagcaataatgggtctcaatctgggcagatgagggagagggagagcagaggaaactccacagggttgattggggtgagagaagatcctgggatattcccggggtcccagtttgaggacaagatggtgccttcactcgaggggagtacctcttgcatttctcatgtccccttttctccctttgcctgtggtcaccaatatctcaattgctggtctcagctctagtggaagacccaggctgcctcagcctggcccctaccccttcacgctcacataatcctgcctcccgcagtaatgcagacccctggccacccaagcctctgcctggaatctccccactgcctggcacgtgggaaatagcttccctggcctgtcccagttgcagtctcctgctgtggtgtggtgtgctgaacaccagttcattgaagactaggtgcattgcctttgctctaacagaattgccccacggttcccctcagtcaactgcgtctgcctggaagatgctcaaagcaggaactcctccaatttttctctccatccaagtctccccaacctgaataacccaccaacctattcagtcagagggtctgaattcatttgacaaaaaggaagaatgggattgcttgccttaaaactgacccaaactgtggctgatgtccagatccctcacacagccatttgacacttagtcacctccaaaatagaaatgatctccccagaaccagacaaacagaaaaaactcttccctactaagcccgctgtctgtttgtagacagccattcccatagcgctgtttcctcatgagctgaccattaaccaaccttcctgtatccatctggacacataattgcaagtgacaggaattccaactaaaactgaattgatcaaaataaggaatgtgttggttcatgtggttggaagttgagaagcacactggcttccggcaagacttgatcctggccacagctcttggtaagctctctccctttaagatactgagaacccttaaacaattattcattcctttatttctctatatttaactaccttgggccagatactgtttcaggtactgggaatgcagaagtgaacagaacagtcaaacatccctgccctcatgcctataatatatctctagaaaaaaaatgcaaaaaacctagtaactctggttgcctctggggtgaagaactgcctggctgggagaagcttcttcctcaaacctagtaagaaagaggaagtcttggaattgagatgcaggtcttaattggtctgattcagggttggtgcccatttttgattcaccgagcctggctcaagtcaatcagtggctgcgtgcagaaggcagtcttcccttcccatgactaaaggtttgggaaatgtggtaggaagagggtggaggaaggggaaattccttccagtttggtaatagagactttggagtcaggagctctaaggaaatgggccccagggtcttggagaggagtgccagccaaggctgggcccagctcctctgcagaccctcaggctctcccacccacagccaagaggtgaggctgtcctgagcattttacacctgtggtcccagcttattgtaaagaaagaccacatttatatacagtcccagattaataggtcagcctattacaagaccattaacactaagacaacccaggacattttactaccttctctttaaaccaaatccaccctaccccctgggatttcccaagccagcgccatgttcagggaagacagagccacagtcagggctaaggccaaatcccatcaagagcacctgaatcagcacctttaaacttctgcagctttcttctcgaaataaaatgttgcttggaagccacttccactttcttaggaatcccttcaggaaaacgctttggggttgaagagccagaaatgagctattttagatagcaaagaggatgaaaagtacaatagcagaaatgaacaggctgctggcagtgtcaagggaacaaggggaggaaacagggaatgccataatataatgtgcaatggaatcagaaacagcccagaaaacactacttagtacataaatgttaaacaaaagccatgtccaaacatacttggtttccctttctccaatcttctctcatttgggtctatcagtatatttaccttgctgctatattaatttctcaaacatctagtaacagttgtggccacactcaaaaacttaacaacttccaatgccttcaaccgaaactatatgtgtctaatttgggcattcaagatacttataagattacttttaactaccttttctcccttatttttcacccaactcctacattttgggtcacagatcatagaaagcttttgaatggcctgacagtcttttaaaggttgttcggttgtagtataatctaccattttactacttttggctttatgcagttttggtaccacagctatttgaggttatgaacattttcctttccaaacaatctaataacccactctgattaaactagctttactttttttctttttgcctttagagatagcagagtaccttgtacacagtaggtgcttaataaatattaatccactcttgttccttagctgtactcatgcttcttcctgttttgggaatgatctccaacttttctttgtttgccaaaaaataatcatccttccaggaccaaatcaaaagtcaactcttcaaagccttcctgtctgtcttgtcacaggtgagatgaccctcttccccttcaaagtatgactttatccagaaaatgtataccctgtgtgtctcaagtgttacagaactgatactgtttgtgtaagtgtggctatttgtggctgcaaatgcaaagtctttgaagacaatgtgttctattaatttctgtatctacagtattcatttagcacctgatgcctactagttattgagagattaaaaatggatttcctgaataaatggaagaatgggtgaagtcttgagcagaaatgggccatttgaggtctgctaaaggtctgagtggttgaggagagcttattcagttccttcaaggattttctccaggctttccgcccctagcctgtacacagagtaagtctgtatttagagtaatgtgatttaaaggtcacatttattagcaaatagccgtgtttataaatttagcttgtcaaaaaagggagcctttgaaattaattctgtttgctgagactagcaccaagttcaaccaacagtgcatactgagccgaggtaagtgaatttccagcccatgtggcttttacaatcttatgctcctcacccactcctttgtatattgtttttgaaactttacttagcgtttttactgcatgactggatctttaggctgaaatttacctatttagtgttcatttgttattgttgtgatattctgcttttaaaagtttactgactggaggagatggatttcaggacctagtgtgatttttttcctctccaggccagtcaccctgcagggccctcatctcttttcttgagagagtccaaagactgtgggactaggcctgctggtctgctggtgttctcccatctctgcctctgagcaccctgctggaaaggctaccctgagatgttggtggactggatctctgatctagaaaaaactgctcagaggcaaaagctacaagaggcacgttctggcatgaatgatactggctcttccggcccccagattgcagatccacagagaagactatgggtgaaagatgaccccaggtgtagaacttcatcttaggaagagatcacccaaccagagacttcgtacacatcatttggttgattttagttaacgagagcatggaagatgttggaataattgctaacaatcctggccggggaaattaggaagcccatcctctaattaaaatttaatgtagaggaactgaccatcatgaatgaatggactcaattccttgagaagaagacagataatttcaaactatttcctagaacaagtaaaggcactcagttgtacagagtgaggaggtttccctaggcaagattggtggcagcctcaggatgtatggggccggaggctgttatattctcactgggcgagagaaatggatagggaatgataatgatgaatgagttttctttcaaagtactcactaagggaggctctccattttctttttcctcactaaagtgcctcaaaatgcttaaagaattccactttggaattacttccgaactagtttatattttctatcccatgactctacaattgcacctcatttttaaccaaaaaatcatttcctgcttcatcaaccaccttattcatcagacgtggccctggatgattttcggttgtttccaaaaatgaaattcaacctcaaagcttaaagatttacgctatcgcagctcctgaagaaatgtgccatcaactctaaagatgaagaggagttccagatatattttggtattgaaaaaaatttacgtctcattattttgccatctcatacattttcatatcttcttctcttatattgctttgaagatgaaactcagatctgtataaagtatttcaagcatattaaccaaagagttgtgcttaatccagccacctgtaactaaatttctgtctctatagtgtctcggaaaaaagaaagaaagtggaaaggcaggttgagaaaaaatagaagtgcatataattaaatcatgaaagagtgatggatacatgatgtgttctacttactctgtgcggcctctgccagccttgtgtacatgatgtgtggtaggttacatcatacctttgttacttttgggttactaaagtaatacatacttactgtagaaaattagaaaaaaaaaagaaacaaaaggaagagaatttaaaatcatctgtaactctatcaactatggaattttgatctttcacctttctagtcttttttaatagattattttgtggcagatttaattcattagtgttcttgtttgtttatttaaaaagatagatacaaacagaaacttccataaaacaggtagagtgaattgcattaacctttagtcagctctttcttcctttccttataggaaaccaactaccttgatttttacagtactcagggtttgttgttgttgttgtttttcttcatagttttatcatctaagtcaaaagtcattttccttttcttctctactatggtcactatgagatcatggatttttatttatctaagtgtaattattattctttctaacactcaaattgtccttaaaatatggccagtgggagcttcatcaagcagttcctgggaacttcttgcacagtcccactagcccaaacactcctttgctttctgatccagcaagacttttcaggctcacatggtgagcttcctgccctgactgtttctccagtgacccctggtttctgttaggggtcatttaggaatggagatcagggagcttcatgcaccttgctattgaggtgccagtgtttctggttccttcagaggacagaactaggaaatatacacacatattttaggctcatattgatatttcaaattcaaatgtagcattgctatatttcataaattatttgccattatcttttggctctcttttatttccagcttttttctctatgtgtgattgcatgcatgtgtacagatgtgcctgtctgtgtgttggatatacttgacaatttacaaaataatcactgtacaagtagaaagttctggataggaagcaagacaatgctttaatggtgacaggcccctctggtatggaaaagtgtttgggggtcaatatagaaggtccagatcatcttaccatgaataagtggagagtaaagaagacgttcttagtgtcagggctgggctaggctgaacagggtactgggactcatgcttcagcccgtggacctccttaggggaaccacatcaacgtggtgggccacatcgctgacctccagacaggtcttttgaaagaagactatgatgaacatacctgcagggcaatcttttcccacatttatcttataaatgtggacactttcttataaattatgaaaatagaaaaatgtcctaaaatgaaattgctgggtcagtatatatatccagttttaaagctaaatactgatgcatattgctaaattgaacacccaaaagactctatcaacttatggctctataagtgttatatatttagtctagaattctttgatcaatatttgtattgggaccacttcttttttttattcctttacttatgctttacttcttctgtgtgctactgtgatacatttgtatttcttttttttttctctctctctttttgagatggagttttgcttttgttgcccaggctggagtgcaatggcacggtcttggcacactgcaacctctgcctcccgggttcaagcgattctcttgcctcagcctccagagtagctgggattacaggcacccacgatcatgcctggctaatttttgtatttttagtagagatggggtttcaccatgttgacgaggctggtcttgaactcctgacctcaggtgatccacctatctcagcttctcaaagtgctggaattacaggtgtgagtcaccgtgcccggcctatttgtatttcttttaagcagtatacaattggatttcatattttaagccaatttacatttaaagttttaacttatatcttaccttttagtttatctctgcttcaggaggcaaagtctgaggcaaaatccttgctcttgtcagtctattttgtagcaaatggtgattcctaccagattctgacattaggttgtgtgcccatctctcttattcaggaatgtgtggatattccttctgatgatttctttccttcttctttgtattttagctaaaaatggcaagagcctgcattgtatgctgttaatggaatgtgattttttttttttaaacagagtcttgctctgtcccccagggtggagtgcagtggcagtatctcagctcactgccacctctgcctcctgggttcaagagattctcctgcctcagcctcccgagtagctgggactacaggcatgagccaccacgcttggctaatttttgcatttttagcagagacggggtttcaccttgttggcgaggctggtcttgaactcctgacctcaagtgatacgcctatctcaacctcccaaagtgctaggattacaggtgtgagcccccatgcccggctggaatgtgattttttgcatcagaaatcccttgtattgaaagtaaacttaatgttatttataagacatatcacttcaagaaataaactaatatgcgtgtatgcattttatacttattattgtggggaggtaggggatttttaaatcatttcatcactttattagtttcttggaaagaaatgtgaaaactttatttggagagaactgtttgtgtaggctgtagacctgttccatgtcattctggggttactaaagtcataatgggttagaaagctgtaaggatacaagatgtaattaaaaagagccactaatacatattcccaaaccaacaggaaaagactaaagatgctgcatggtactgaagaattgctcatggtataaatttgtatttgtcttaggtcgttattattttatacatagcttaaaaattaacatgcttgattcattttgggagtttccttgccaaaattataactaatccttatgttttggatgttgatgtttgtgagaggatcatttccatcccgttactaatttttacagaggagggtttgaggggaaggggggcttcccctcaaagaggggaatttgctctagatcatctgggaagccagctgtgaagtaaactgggttagtttttctccatttccttttctgaaggaaagttttttgtaaggactgattttccatttcacccaaacctgaagctcattacagagaaaggatatcagttgtatttttaaacctcttttagcttgtagacagtcgtgcatgtacacaaatataaatttactggagcagagacagcctaaggagggattgcggggattgcggtcaccaccagtgaccgaaggctgctgtctcattgagaatcccgcaggcagggtacagaatagcatggttctcaaatgtcttggtctcaggatccacttatactcttaaaaattactgaggaccccaaaaactttttatctaggtgcattaaatctattgggactgattatattagatattaaaattttgaaagatttgtttaaaagtaacaagggcgcggtggcttatgcctgtaatcccagcactttgggaggccgaggctggtggatcacctgaggtgaggagttcaaaaccagcctggccaacatggtgaaaccctgtctctactaaaaatacacacaaaaattagccggctgtagtggcaggtgcctgtaatcccagctactcaggaggctgaggcaggagaatcacttgaacctgggaggtggagggtgcagtgaggcaagatcacaccactgcactcctgcctgggtggcagagtgacactccatctcaaaaaagaaaaaaattaaagtcacaataataaacctactgcattttaacatgaattactttaaaaataccatatttaccaaaataaacatcgttagcaagaagaggggcattgttttttcattttgcaaatcttaggaaatgtctatctagtaaaatacagcagtattctcatatttgtttctgtattccatctatggatattacatgtcatgtggtcactggagcactccaccatgtactcatgagtgaatgtgaatgaaaacaagagaaataatgccttcatattattacgaaaataatgctgatattccaggtctcctgaaaaagtttgaggttcccccgggggtgctgagaccacactctgagaaccattggtggaggaaggtgtagtggaggccagaacactgggaattacaaactaaggttttgtgaacaaagaaacagcttaatctttataattttgtttttagaaactgatctccaacgatgttagagatcagctaattttgtaaacatttacaaaagtttaataaaatcattctgatttatcttcagaactccgaattcctacatataattgctactcaacatctctatgtggatgtctagtagacatttcaactcttgttcagaactcatctcctgatcttctacccttaagtttctcctgttgtggcatcacccatttagttaatggcaatttcatcattatagttgctcagacacaacacctaaaaatcattgttgacccctccctgggatcaactctgtctgggatgtagctctggtctgagccaccagcatctctcacctgggttactcttacctgttctctctgctcctaccctccctgaccaaatccccattgtccattttttgttaatagccaggatgatccttttaacacctaagaccgtgcacttttctgctcaaaactatgtaatgactcctcctttcaatcagcgtcaaagctgacatcttaaaatgcccttaagaccttacctgctctgtctcaacctgtccctctatgagcccgtggctccctgtcccgcccccacactgctccagccacagtgggctcctgactgttctttggacacaccagacaggtttctgcctcagggcctttacccaggctcttcctgccatctggaatgctcttcccccttatatattcaaactccattattttcaatatttgttcagatagtaagcttctcactgtattctactctgacaactctacttaaaaatgcaagtcccacctcctgcaccagaatgcttgtcacccccttaccattctatactttaaaaaaaaaaaactctttctcacccccattaggcatttaaacccttctacttattttgtttatgtttcttgtttcttggttttctcccctagagtaaatcccacaggtcaagagttcttgtcagcactttttctctacataacacaagaacttagaacagtgtcaagcaagttgaagacatataataaatatttgataaatgaatggctggatagaatgccttaagaaaaactcgggtgacttggaatcatccctagtatttgaggttgttatcaattaaaatcaatcatgaggaattaattgggggtattaataactgaatctccttccaatgcaagtgacaaaaattcaattcaccttggcttaaaccagaaaagaaaacaaaataaatttaatggccaggcgcagtggctcatgcctgtaatcccagcactttgggaggccgagatgggtggatcacaaggtcaggagattgagaccatcctggctaacatgatgaaaccccgtctctactaaaatacaaaaaattagccaggtatggcacgcgcatgtagtcccagctactcaggaggctgaggcaggggaactgcttgaacctgggaggtggagattgcagtgagctgagattgcaccactgcactcgacaaagcgagactccgtctcaaaaaaaaaaaaaaagaaaaaaagaaatttgttcccttacagaatgggtttcaggcatggctgaatccagggggtcaaatgatgtcattgagatccagtctgtttattctccttcttctgtgtcaacccctcattctcaggcagcctctccctttgtgatgtaaagatgctgcatctaggctgttatgtgaccagctcaaccactccatgagaaagaaaggtacacttgttctctgtcggctgtccttgctctgaggctctctcagcaagggagtgtgcacacatctgtatttacgtctatgtctgtaattgaaaactgtgtgttcaatctgattcctcccattgcaatccaaccatacaggtttgatttttgatttctttctttctcctgtgagtatcttccttctctgacagtgagaaagtacatctccacgtcttatttactcatctgattgatccttctttatgtgatcaaaccccccatccatctttgctgctgacccttccccaggtggacaccctcctcaccctgctagggcgctggcagcttactcagtctgctcctctgcagaggtaccctcttcactcctgctcaggtctgggcactctgcaccacaccttcccatgtgtgacgccttcttaccctacttgggctttgacaccacaggccagaccatgcctttgtagaagttgttttcttgcctctggggctctgacccccaatgctaagccactctgtgagtaggtgctctcctcaccctgctggggctgacaccccatgcctcactgtctctctaggggactctccttttctgctcacactctgagtccccactgtttgtcacctaaaggcatgcacaggagccctccccatcctgcccataggttcttaacacccaacctcaggctcagacaatgcaggcgaggccactccaacatggggatgcccttttcaccctgcttggactcatactcataggccaccatgttttcctccctttcctgcataggtgtgaccttgtgctgtcccaattaatagttttgaggctgagttgctcaggaagggaggaaaagggaagaggaagcagaagcaccttttatcttcatttgtgtctgtcatcacaagagactctggacctgatgctgtcctcgatttctgagactcaaatgcccacctggctccatagtcaaggaagcaattgccgctgcctttaatcagtcctggccggggactcctctcacctttccatgatctgttttcctccctggcacttatcaccctctgacctatttgttgcatgaattcctccatttctagcagtcagtgctgtgcctggcacatggaagtaccaagaaatatttccttaatgattgagtcctagaacagaacgcagtaatgaggctgtcccacatggccagggaggctctgggtgcagtaatgaatatggaggatgtgtcttccctaaaccacactcaactcagtccaacctgctcagattctcggcctcagtggaattcttctgtgcatcctgggttctatagttgctaatgcttcagtgtcttttcatcccaacaccccatcagggccacctcctttggcctgtgaaggaccagtgacttatgggagctgacagaggaggaagtgtagttagcattcattcattgcttatgttgtacaggctgtcaaaactaatgaaattttatgacagacgggcaacgaccagcttcctggtgttatttatctttctcgcttctggcttggagcactgggtgatttttcatttatatttaaaaatgccaagatgactaagcgcaattcgcctactcagaaaactagcaaattgtatcaatgcacaaatgtaattaataatcatcaggcatgagaaatgaggagcagttaagcaggatagtctatctttccaattcttctccccctcccctaccaccatttcaaccagttcccagactccagggacatacgtcacgttttttctctctttgctcacatctgatagccaatatttgcaatgacaagcaaaaggtccttgtggctggtgacatgagtccccatggctcagtagacatatttatagccaccttagaggagatgatgcaaatagatgtaacgcataaaaagaaaaagacgaaaaaaatggaaaatttaatgtaagagggaacggaggtcctgggagacaggttaattctagagtgacaagacccaagattgtgagactgtgtttatgtaaccaagagaaacccacagaaccaattcatcataacaacctaaacctgggggctgtatgtgccttgacaaattcatttatatacatcacttaattctcttatctcctcattcctgcagtatgttatctgtgtttcctttgctctcatctctacctgctattgcagggtctctaggctctcaaatttcctgctctgcacaaattacttctgggaggtctccagaggtatctcaaatgggttcactaataaactgttaggtctcatgtagcatctgcattatttttcttcctttctcctgctaccatcagacttttgatgagctgcatcctcaaggcaccaaagcaacagccccacgtcctctggagacctctgagggtcaagagcttttcacattctgtacagtcaggagaatgttttctctccactcccagcattttcatagggactttaaaattgtgcagctatgttccagtgccttctagatttttttttagtaaacagtttttgggtgagcagacaaagctgaaaggcaaacattataatactctactcaaaaatccaagcatttgctgccatgactgccatgactaaggctttgttatgggtccaagcttttctgcctcaccttctctcttttgtaatgggttattttccagagggcacgtcattttaaaaatgcaagttggcattggaaaggtgagacatgtccagacataccagcctcacagtagtgaacacttgttcaggctcaaaatggcacatcttgatcaccacggtgtacttacgcagggcccacagtgtgctagctgctccaggtgctgcaaagtgaatcagacacaggacccaacacggtcatgcagtaaataaccattaggactaaataaatggtggggaaagtaaaaataagtgcaaaaagagatatacggataatgtggtaaagaggagagctacttcctgtagccttgaaaatcgaatggcttaatggaggacccaatagagccgagccttgtgaggacatgaacatgtagaggagtggaatccaaaaggtatttcagcaagagggagtgctaggagtagaagcaaagggtgaatgttactagcaatatgagtggattaacagagtttcaaattggctaaagcataccttgtttgaaggggaatggttagagaaatcatagtggaaatggggagtgagacctccggggcatgtttgaccagtgggctgagatttttcttttttaagatggagtctcactctgtcaccaggctggagtgcagtggcgccctcttggctcactgcaacctccgcctccctccctggctcaagctattctcctacctcagcttcctgagtagctgggattacaggcatgcaccacaacgcccaactaattttgtatttttaatagaggcggggttccaccatattggccaggatggtctcgatctcctgatctcatgatttgcccgccttggcctcccaaagtgctgggatttcagtcgtgagccaccgtgcctggcctatatcttatttttatgcagcaaaatatgtcgaactaagatagtacactatttagagccattaaaagccattgcatagaggactgtgtttttgaatcagtcaggttcacctggatcaggtaggtgcacctagatcagtgtgtgtcagatgaataggagaagagatctgggcaggcacatcagtgaggaggtctctgcaatagcagaagacatgggtactaagattgaaacagaagaaattcagagtagaaagatgatgagctttggagagagagtagatggatacccagagtgaggaaaaagaggaagctaagaagagccccacatgaggaaggagaaatatgatgtccaagaggcagagtgaatttttggagggaacagaatgagttcacacattcgaaacaactttgtaaggtgagtgggataggaacattcattcttttttttttaattaattatttatttatttttatttttttctttgagatggagtcttgctctgtcacccaggctggggtgcagtggcgcaatctctgctcactgcaacctccgctcactgcaacctccacctcctgggttcaagcgattctcctccctcagcctcccaagtagctggaattacaggcacgcaccaccacacccagctaattttttatatttttggtagagacggggtttcactatgttggccaggctggtctggatctcctgacctcgagtgatccacctgcctcagcctcccaaagtgctgagattacaggtgtgagccaccatgctcagccttattcttattttaaaggcaggagagttgttacatggagcaggtaagtgtgtgtccatggtcacagggcatgtggcagaagtgactctcaaactccaattttcggatgttaaaacattttctcttttcttgatacacatacacttgaatatgttcatgcctgaagaggatggcagaaggaagattaaagaaaaagatgaggaataaggagttactctgttgatgaagaaagcacacacactgtgttcatgttagcaattatttctgggagatccatcaggcaaatgaaatctcctaatccaattcaggaaggaatttcctggacatgtggatccataatcctgtttaactcctccaaaaagagagactaaagttagagatcaactccagtaaaaaagcaaacttagaggtaacgattgcaaacagagcctgggcatccccccgctggggtcccgggctatcatctaataaaagccatacaagtccataagccacatggaaatcgctttacccagaagcttctggaaggtccacgtgttcataactaggacactggtaacagacctattcctcttggttatcttatgtgatagttgtttgtgaagcatccctttctagagaatttagattctgtcattgtctattttgcacttgggaatgtggtagtggtgtgttgtttttctcttcggctggtgaggaaaagaggtgggaaaccctgggcttgccaatgtcctatttgtctttctgtttgttgttgcaactggcctcattaaatcaggcgagagctgccaacgtatacaactttggctttcctaattaaagttctgctgaaaaaagctgcccctctcctctgactctctcacaggaatgcactctcgtaacagaggcatctgccccctggactaacctttcttaaaaccagataaacaaagtaataccaataaaaatatccatctgtgtttaaagataaatagagcattaatataccaaactgagatctggattcttttggaaccagctttaatgatattagacatctgttctggcttgctttccactcattttccacttgcagattcttataagaaaaccatgtgacagcagtttttctgtgggaagtgggggtgccacctgaacccctgccctttctcaggtgattgccccagtagagggtagtagatcccaaaggtgtaagccagtgatgtcccttaccatgtggcagtctgtttgggcctcattgtggattttaagcactgtgatctttttacatgtttatttttgagataccagaacgccaacttattcctttacaatggtaagtggaattgtcaagtagaccagatgcacaaatgttggcacaatcgtggcagcctttctcatcctggagttaagtcgtatgaatatccaagaaatatccaggagctattcatttaccaggagagagcagtttctctggcaggaaaggtgggaggtccccatgatgattgtttcttttaaagagaattggacttggatgacaaaaaaaacaccctttaagtgtttcttttaccatttttaacactcaagaacaatttcaggcaaagtactattgtgggaaatctttctccacttaaatgcagacttgtcgacctggatttgttagatttggtgctaactccaaagtgactacgggcagatcagtgggggtgggggccacgttggaaatgtgcgggggcattcagaattgttccgatgatgggagagatgacactgatttttggtgcccgaagaacaacaatgccagaggcacagcaatttgagggacagtcttagtcgaattgcctgtttgaaatgctgatataacagggtattgagaagcactgactttttcaaataatggacactttttttgaaacaaaaatcttacacaggacaccaatatataaaactcattgaaggagagctattttgcctgacagagaggaggtctctgaaatacttctacgaaacatagtttgagaaccactattttagctgataccaaatggccatagagctttactattctgtctggttctactatgttataaagactaagtagtttacttttactttttctttctttctttcctttatttttttttttcgatatggagtctcactttgttgcctaggctagagtgcagtagcgtgatcttggctcactacaacctccacctcccaggttcaagcaattctcctgcctcagcttcccaagtagctggaactacaggcccgtgccatcacactcggctaattttttgtatttttagtagagatggagtttcaccatgttagccaggatggtcttgatctcatgacctcgtgatccgcccgccttggcctcccaaagtgctgggattacaggcgtgagccacagcgcccggccaatttcacaaatagattttttttcttactgtaaatcttagcaagctcagcatatgaatttttttttttccttaaattgaaagcttttaccctttcacttaaaggcagcactttatggcttctcttgggcatatccaaactgctaccatcactactcgtgttagtccattttcacgctgctgataaagacatacctgagactgagaaatttaccaaataaagaggtgtactggacttacagttccacatggctggggaggcctcgcaatcatggtggaaggcaagaaggagcaagtcatgtcttacatggatggcagctggcaaagagaaagcttgtacagggagactcccgttttgaaaaccatcagatcttgtgagactcattcactattacaagaacagtgcaggaaagatgcacccctgtgcttcaatcacctcccagcaggttcctcccacgacatgtgggaattgtgggagttacaattcaagatgagatttggttggggacacagccaaaccatatcactactcttgtgctttggggccattatgaagtaaaacaagcattatttgaagacaaggactgcaataccaccacagtagatctgataactgttggctactaagtgacaaaggggcaggtgaagtatacagcgtggatgcgatggacaaaggggaggatctacctcccagctgggatggagcaggacgatgcaagatttcatcacactactcagaaaggcatgcagtttaaagctcgtaaattatttcaggaattttccatttaatattttcaggctgtggctgaccgtgagtaacaaacccaggaaagcgaaactgcagaacagtggatgggagaaagggtgaattactgtatattcatgagggatattagtccatagtttcttttttcccttttaacaaatttttgggttttgtatatagtttgtctggttttggtatcagggtaatactagcttcataaaatgaattggaaagcgtttcttctgttttccgaaaaagattatatggaattagcattcattctttaaacacttggtagaaatcttaagtaaaaccatctgagctcggagatttttttgtgtgtgttataaaattacatattcagtttccttaatatttataagatcattttaattatctgtgtttttcagtgaaacgggtccattttctgtatgttgtcaaattaatatttgtagaattgtattagtattcttaattatccttttgatgtctgcagaatctgtaatggtatccctgttttatttctgaaattaatttgtgccgttatgtctttttttctttgttgatcttgtcagaagtttgtcaattttatcaatttgttccaagaaccagctcattgatttggtttcagtttcattgatttctacttttatctttattatttccttctttttcttgcttttggtatattttgtgcttctttttctaggttctagaggtggaagcatacgttattgatttgagacctttcctcttttctaatgtgagcattttagttacatttagttccctcctaggactactttaattgggttattgagaggtgttgaagtctccaactgtatttgtggatttatttatttttcctttcagttctattagttttagcttcacattattttgcagctctgatgtttaaaggtgcatgaacatttaggctcactacgtctcagtgaattgacccttttatcattatgtaatattcctctcagtctctggtcattttctttgtgctgaaatatactttatctgataatataatgactgttccctgtagattaatattttcaggatgtatcatttttatttttttattttcaacctgcctgtaatcattatatttgcagtgaattttttctagacactgtatagttgaatcatttaaaaaagtctgctctggcaatgtgtcttttaattggtgtatttagatcattacatttaatatatttactgatatgttagggcataataattttttgttttctgtttgtgtctctgcttattatttctgttttctttttcctgcttcctttgggttgtttggacatttcctttagaattatatttcaatttatatatagtttttttttaaaaagagtatctcttcatacagatttttttagtggttataaccagctgatgctgctggttcgagagccctttggctgagaaagcagatagctcaccagcccggcagcctgggtctccaggtagtatcaggtcaggccaacgacactgagacatttgtccaccctgagaggactctgagcacctgtggctgaggccaaaggaccacagggctaaggatggggagactccaactccagtcgatatgcataccttggcaagcttctcactacagcccactgttcatggagaagctgggccttgcagatcgaccagaaacccccacgatatgccactttctgcccctatgtcctgcgtgtcctgggcattggccctgtctcccttggcaaacacagaacactgttccatctcagagattgcttcaccagagaaacagatgcatttatggtactgtaagtactatagtatatgtgttgccaattactgtaaagtcgtaagtatttataattctggttctgatttgatgggcacttgaggtagctgtgggtgggagggtatgcttattgtccgaggagactcacaaccatttctcaggtttcccttgcagagtgtgtgccgttaccagtgggatagtgggtgtgccaaggagaaaaatggccagttagaaaaaaatcccaagactagtctatgcagaatctctcgcctacagacagggcattaatagcccagtggtgggtgagcggcagaggccaggactggactcagacttttgcctcacaaagctgtgaggactctgaaggtcctgcccctgcctcacacagcctcgccaggagtctgctgagcacctttgaaacaagaacagggaaaagatgaaggtctgggaagccactgagctcacaatattcatctacactggtcacctttgtgttagagagtgtgtgtatctgtatgactgagtacatgtgtctacgtgcatagatatatctgcgcaagcctgtctgtatgtgcacattatatgttgatgtgtacgtatgtcagttctatggctgtgtacctgggtggatatgtgcacactggaatgtgggacctgtgtgagaatgtaacatttgcttgcatgtgaggatgcatatctatgtgtaaatgctctcatgtcttgcatgtttagtgtgtgtgtatctgggcacacatgagtgcatgtgtagagatacgtgtctgtgtgtatgcttgctctccatgcatctgtgtttttatatgtgtaactgagtgtatttctacatgtgggggtgactgcgtgttcctctttgaggatctgcatgaatgtgtcctttttgcgagatttctcttcccattcgtcttacatctctctcactagttaaatgttccccatctctgtgcctcctctattcattctctctcaccaaatgagcttctaagcaccagtctccttctgccatcagattggctgttttcactgcacagttctcttctcaccccgtacttgctttcttcccctgcctttctctgcctgcttttgtcacagtctcattgcttgctgacttggaggctagggctggtcttcacttagcctctcccttcctaatttctagccccagtgggcaaccctgtcttagccctggctgacctccacagtgaatcatcatgttcctgctactttcctgacccctatactcagcctggaattattgtaggagatagcaagagcattcagaagagtcagttggttaccagtgccttggtgtttactcttttatgtcttagttccttagctgggggtggggtttgatagggaaggggtggtatagctagaatgcaaactaagaacttctccatctgctttcctttttctttcgttgacaaaatgtcaccttttctactccaaactgaccaagaagttgtatttgccgtttgtggctactcacgtcctactgcccagccaagggaccctataacatctcagtccaatgagttggttgaaaagaagagagggagagagttcactctcattttcgtatcacaattgcccttctttttagcaagtgtatgaactcacagtgcttttctatgaataaaccatggaccacatgaaagatcatttttcttaaagaaaaaaaattccctaaacccagaggggaccagcaaatacttaacaggagattagagatttcctgtgagtgcatatggtgcggggtgacctgattctgtgaagcaaatgttattgtcctccttaaattcatgtgttgaattctaattctatgtgatggtatttggaggtggggccttggcaggtgattcagttcatgaaggcagggacctcatgaatggaattggtgccccttcaaagggactgcagagagctccctcatcccttctgtcatgtaaagacacagtaaaaaagatggctgtctatgaaccaggaagtcagccccacggaatctgctgacaatttgaccttggattttaccatctccagaactgtgagaaatcaattttctacgctacctagtctatggcattctgttttgacacccagattagctaaagtagcagcatatcaacttgcacacataattcttggaaactctgatgccaaatccttgatggcaaaaggtgattgatctgccggagacatgagcctacatcatccctctttccacaataaaccagagagtcaaaacagtcaagagtaggtcaaggtcttctaaaagccatacctgaaaggtttccaataacagatgactcgatggtaattcagccacacaaacaaccacaacaaaagacacaactatcagagattttcaggatagcctcaaaaacaccatctaacattagggagttcaaaaaggcatgaagtttcagaaatcaaactttattgtaatctcgtttcatcaacttgtaattctaacactattaataaatggtagggcaggtggtggcatggagagcctggggcacaacggctgtcgttaaaagctttgtttgctttaccctttggagccacctcctggtcccctcacccactgcccgcctgttaagggcctgtcccgggcagcacattaggggcaaacagcctggatgcccagctgtggacccgcatccatgcctggaggaggaggttgcctctgggagcaggcgtagctgctggaactcttcttcccagccttcttttaatgctctccggcacctcctgcacacagataaaccaggatcaggagaataaacggacctgcagcagcaggactgtggttctagtgaatgagagaagcctctctccagcgaggtacaggaggccaggccaaatgccctgctctctgcctgcatgtttgccaccgtgcccaggactaggggcagcatgggagctgctggctggggctgtgctggtcaccccctccctcccacttctctctccagccacgctttcagttccagggttagggctagtggctacagtacgtgccgtgatttcaggcagctcctcgttggtctggtccttggctggagctccctccagctccagtgctctctctggaggggcctcttcccatgctggctctggctccgccgctggtgctggcagtgctcttacttctgcacatggaccaggagctgagaaaggagaaagggtcaccagcctcagtcactttccactggaatttccaaacacagaaacgacctcactgaatttaagggaattccagcccaaaatcaccgcccccgcaaagtcttccaggctgcaggccacctcaccaagtgtctgtgcctcaatgagctcctgaatctcctggacaaggacagtgtgcagctgcagccccaatgggatctctggtgtggcctggcctgctagggcctgccccaggctgtcctgtggtacctggatgcgccttattacaacgggcgacaggcgtctggggtgagggatgagccttcttcggcatcgtcggaaaaggctctcactccctccattcctgaagcagcaacctctcgaagtggggaagcaacacgagaacatcttgctctcttgagcgactcccaccaagtgagctgtttacggcgctgactctaggatatgggtgcctggttaccagagttctaagttctgttcgtgtggtcatcatccaggaagtgaggtcgcttctttacggttctgtcccctagtccccttccttccataagacctactcaggactccactgggctgctgactactcaccctcccctcaggtcatctcctgacccgtacacagttatgtccacccagggtctgcttggacacctgtgcctgatgttcaccaggggccagatgtcgtcctcaggcctgatgtccacctggggcctgatgtctgccttggcctatgtccctcttggggccttgtgttcacctggggactgtatccagctggggcctgatggcctactgggtcttgttgttcacctaaggccttgtgtccacctggggactggtgatcacctggggcctgggtgtccacctgaggccagaggtgcacctaaggcctgagttttcacctgggcctgatgatcacctggggacttgggtctaatgtctacctggagccttgggtctaatgtccacccggagcctacgtatctacctaaggcatgatgtctacctgcggcctgatgtcctcatgagtctggtgttcaacatgggcctgctgtccacctagggccttggtgtccatctggggcctggttgtcaacttggggcctggtatacactttgagtccagggtccacctggggactgacgtctgcctggaggactgacgtcctcctgagtgaggtgggaggatctctggagctcaagaggttgagaccacagtgagctgtgattgtgccactgccctccagtctgggtgacagagtgagaccctgtctcaaacaaataaacaaaaaagccacacaaattatatagctatacaaaaatattttgtttctttttaaccttattctatgagcttttttcattatttatttattttacttttaaaccgtttgttgttaaaaaacaagacacaaccagacactttcgcctaaggctaagcagggtcaggatcatcaatttcactgtcctctacctccacatcttgtcccaccggaaggtcttcaggggcagtaacaggcatggagctgtcatctccttgataagaatgccttcttctggaaacctcctgaagaaactgcctgaggctgcttcacagttaccttaaaaaaaagtagtaagcatatactctaaaataacaataaaaaatataggatattaaatacataaaacaataacatcagcatctattattttcatcaagcattatgcactgttgataatcgtatgttcacacccacatcaccacaaacatgtaagctctgtggtgtccaatgaatctgcctttctttacctacaactgtcttggtaaattcttttaccacccatcccactgtcccagagagtcgctgctcccctacgacactgagtaaggaggagatacagctgacaccacctggaaatattccctgaggccaagctcaggccacagattatggtgaagcctccaacttccacactgtaagccaccaggggcctggtgacccctgtgacgaggccacagggagcatctatggatcaggcacttacagaggccccagggtataccccagcacactggaggcccctccccacacccacaaccccaggcatgtatacaggatccacactcctgcccacaaacaccaggtaatgcatgaggggaagggaggctgccttgagactaagcactgcctcactacctaaaagcactctgtcatcatgagggtgaaccagagattgcctggactggccgtttaatccatcactttggcccttgagttactaacattgttgcaactgtccaaagttactaactttgggttttctgcccacctaactgccggaagctaagatggcaacatcagtatcagtcaaataaagcaacacgcgttaacttagtgaccactacacaagctcaccagtacatccttctggtgccaccaggatgccacttactcctctacataagagaaaggatttttaaagtagaatatgaattattgctttttatggagatgccattattaaattttataattgtcctgctttttcccaagtgtgacatataaacagttaaaattgattccagatcattaaatcatatgcaataatttttatatacattatctgctgagttgaatattacataagtcttctccaacccataggtaatcttacaaagacagaggcatattttttaaatgactgagcttgatatcaaacaatataaaggctgttaagaatgctgagatggatttgtttaatagatgtcaaaccggccttctttcacaggaagcgcatacggccgctgcacttgcaccggacaatttatttgtgtgtccatggacaagatgtaaagaaaaacaatgaataacatccaaagcagtgaaaacattgcagctgggctctggaattcttagtagaaaccatgaaaaggcaatgaaaacacttagagcaattgcaggttagaaactgggattcacaggagcttaatggagcacatgatgttaagtgaagtgagccaggcacaaaaagacaactaccacgtgatctgacttatgtggaatgtaaaacaattgaactcatggaagcagagagtagaatggaggataccaggggctgggaggcaggggtttggggagacggtgaaagcgttctaaagtgtagttagacaggacaagattgcgccactgcattccagcctgggcgacagaatgagactccatctcaaaaaaaagaaaatattcttggtcaggtgtggtagctcggcacctgtaatcccagctactcaggaggctgagggatgagaaccccttgaacccgggaagtggaggttacagtgagccgagatcatgccactgcactccagcctgggcaacagagggagactctgcatcaaaaattaaaaaaaaaatcattcttgaataaaaacacaacacctttaattccatgctattgtcctttatatattaacttgtagaaaacgaaaacatttatataatgaaatttattattctacttttgattaatatgttccccttatatcatgcagtttacttcttaatcagtctccataatcaactgcattttttttttttttgagatggagtcttgctcttgttgcccaggcatgagtgcaatggcatgatctcggctcacctctgcctccggggttcaagctgttctcctgtctcaacctcctgagtagctaggattataggcatgcgccaccacgcctggctaattttgtacttttagtagagatggggtttctccatgttggtcaggctggtctcgaactcccgacttcaggtgattcacccgcctcggcttcccaaagtgctgggattacaggtgtgagccaccgcacccagccgtatttccttacagatattaaatttgaagcatttgtcttttaagatatccttttgtcagtttcacttactgatggcaactttctacgttgagtaacatgattcatctctgctgtctcgatctgatctcgtgatccacccacctcagcctcccaaagtgctgggattacaggcatgagccaccgcacccagccaatttaatttttcttaaactgtaatttctataattttattcctgtcaacgttttatagggaagttttaaaacacacagaaaagttgaaattgttaacatccagatacatacccgctagatatgtaccgactagattctgcaattgccagtgtttttctcatcacatttctctccatatgcatcaattcaccttatttttagatgctttgcaaagtaagccgcaggcatcggtacatttcgccactaatacttcaacatgcatgtcaagcattagctagggctcaatatttgtttatagctctattttagaggtcaagtttacatacagtgaagcccaccagaatagatctcgtgtacaatttgatgagctttaaaaatacagtcacgtagtccaaaccctcatcaaaatacaaaatatttccattacctctgaattcttctctcatgggcccttcccaccagccccacacccatgggccgtccgttccctcatttctagcaaccattgttctcatttttttcacggctcttccagcgcgtcatataaatgaggtcattgagtccagtactccagtgtttttcacacagcacagcccttcttttttttttttttttttgagacggagtctcgctctgtcacccaggctggagtgcagtggcacgatctcggctcactgcaagatccgcctcccgggtttacgccattctgctgcctcagcgtcccaagtagctggaactacaggtgccacccaccacgcctggctaattttttgtatttttagtagagacggggtttcaccatgttggccaggatggtctcgatctcctgacgtcgtgatccgccagcctcggcctcccaaagtgctgggattacaggcgtgagccactgtgcccagcccaaaattgtcatctttaaagtattgaacccacccatctatgaatatagtaaatactttctcacttccttcaataaagttttgcctttttctcagtaacaatcttacatatcatttgttagatttatttataggtagcttaaagtttttcatgctgtggttaataatgtcctttaaaaatacattttaaaaatagcttgatttttgtatattgatttctagcaagcctactggatttattagtattagtatttaatcattaattctcttgcatattctgtgtatacacatatataatctatcatgtttcccctttttcttaatcttttgctttttgtatctattgtgctttttaagattgaatataattaccatacaataaaatacacagatgttaattatttattttagttagctttgataattatatacccttatgtaattagcaccctcaatcaaaatatagaatacttcagtcactgtgtgcttccttgctgtccattcccatctcccaactctatgcaaccagcaatacttttttctgttaccaacgaactggtttttcctctccttgcactttatataaataaaataataaagtatatattattttgagactggttgcttttgcatgccataaggcccttttaagattcatttatgttgttgcctttattagtaacccattctttctttttctttttcttttttttttgagacagagtttcgttctgttgcccaggctggagtgcagtggtgtgatctcggctcactgcaacctctgtctcccaggttcatgcaattctcctgcctcagcctcccaagtagacccattctttcttttatgactgaatagtattccatgctgtggaataactcagtgtgtttactgattcacttgttgatagacatttgggttgtttaaaggtttttagctattatgaataaggctgctataaacacttcaatattttaactttcttttatttttgtgttatgaagactagaactcacagtataacactgaaagtagaatgaggggtattcttatgtttttgacataattaagttgatatttgtaatagtttttaaatatttatttttatttatttatttaatttttttaagagatgaggtgtctctctttatgttgtccaggctggtctcaaactcctgtcttcaagtaatcctcccgccttggcccccttaaagtgctgggattacaggcgtgagccatcacaccttgcctgcaataggtttttgaaagaatctttttttaagttaaggaagttgccatctattcctagtttgtttaaaatgatttgtttatttggggggataatttggtttcatgaagaatggttgtcaaattccattaaataccttttcttttttttatttttattttattattattatactttaagttctagggtacatgtgcacaatgtgcagatttgttacatatgtatacatgtgccatgttggtgtgctgcacccattaactcgtcatgtagcattaggtgtatctcctactgctatccctcccccctccccccaccccacaacagtccccagagtgtgatgttccccttcctgtgtccatgtaaatcccttttctgcatttattaaagaaaccagtttttctcctttaatctagtaaagtaatgatttatattgatagatcttccaaagcagttttacattcttggataaatattaattagtaatagtttaagaaattatatagctagattttaaaaatatgttatttatggatataaaaatggaaacaatacacaatggtactataagaggggagaagaaaggaggagggcaagggttgaaaaactacctattgagtactatgctcaccacctgggtgatggggtcagttgtacccaagccccagcaccacacaatatacccgtctaacaaatccacacatgtacccttgcaggtaaaaagataaaattaaaaataaataaaataaaatatctgtatgtttgttgctttgttcatgtgtgaaattagctacagattttctttttcattttgtttcaagagttaatggcctcataaaataagctagatagctttcttcctttttctattcttccgaagtaattttacaatattaaaatgatccatttcttgaaggcagaagttacctgtaaaaccaaccaggcttggagattgtttttgtgtgtgtatttagaaaggacagcagcaggggggaggtggcctggattagtttctttgatggtaatatgtatgttcacattttatatttctttttgagccagttgcgttatatttttccagaaaattacttttataatgtaagcttttaaatttattggcattaaattgtgtataatatttatgttaattttctactaccttcctattatgtcttgtcctttctattaagaatattatttatttttatttgcattattcttcttttgttcaagtgagcagatattggtccatcgaatttgtcttctgaaagaaccatttttcttttgttactcttcatgactgattctttggtttaatgttattaatttttgctcttatctttattatttcctttcttctaattccttagggtttactctgctattctttttttaacctttgatttagatactgagtattgtcattttcaactttccttctttgtttaatgtatgcatttaaagatatattttaattatttgcagtgctgtgctggagccaactgtagctcctattggcttgcgggaatctattgtgtgtatccttcccaacttcacacttcatgttggtagcttgaaatagactatgtgggatatttacactatggatattgacaaaggctacaattataatagttctttcccatccccctttccctccaaatatacacaccagcttggggaacctattggaatacatttaccaacacatcattggttgactcccagatttggtatttagtgttcatattatgattttattctaaaatcttatttcttctttactcttcggttgtttagaagtatttgttaaaatttccagatatattaaatttgttgttgttgcttctggcttttaattttattgtgatgtggtctatagaatgctacttctttggcatttgttaggacgtggttggtagcatactatatggtcaatttattaatttgtaattttttaattaaaaaaggttttagagacaggatctcgctatgtttcccaggctggagtgcagtcactattcacaggcaaaagcatagcacactacagccctttaactcctgggctcaagcaatcctcctgcttcagctttccaagtagctaggactacaggtgcatgataatttcacttcacactttatttttaaaagtttatttatgcttgagaacatgtgtattctttaattctcagagttctatatatgtctctttgttcaagcttgttaattatgttgcctcaattgtctatttaattactaatttttgtctatataactactgatttctgcttagatctatcaactacggatctatcaaatctgtgaaaggaatcttaaaatctccactatgttgctatctaaatttcttttccttttgtatcagttttctgtagattttgaggctaaactgttagtgtgaacaaaagttctctgaaaaggaatgtgaaagagactttactgcagtgaacagtttacaaattggggagacacagccctcagtgtaaaatgaaggtgcattcctgagaacaaagggaggctttgggtttcacagtgaaagctcctgtccaggttcctaataagatctgtttatgcaaatgaaagatacaaacttgcttagttctgactgggtaacagagctgagctctgattggttgatacagccgagccctgtttgttgatacaactgagcttgcatcaacattggttggttcaggtgagctctggatgtgtatcaaggtggaacagaggtcttggttttggcagaactcagagttggtgtgtgaactgtagtcagccaatggtcgcttggctctattataaatgtaggactggttagccacttgggatccatgttgaaagattggctctttcagatatatgttcacattaggtacatatgtgattattacatctttacgattaattttttctttaatgaatatgtaatgtccttcttattcataatcatgtcttttgtcttaattattctttcatctgatactattttttcaccagtggcttttttttttttttggttaatatttgcctggtatatccttctatcctttatcattcacttttctattttagatatgctccttataaacagcatatagctaaaacttttcctattataagagtttccactttttaattaataagacaatctctttacatttattgtgcttgcttttttaaaatactaattctctttaacttcctgccttgtactggcttgattatgaagtttttgtgtgcttatttatatgaaatattccattcatgaagataagaattgagaccagtataggtaaaatgaacttcacacacgcagaacgcagctttatcgaattgtttttcatcctttgtttggaaatcacagattctgctcctatttgttttagtggtagccattagcttttaaacatgcatctgtgacctaacccaggacaagaaacttcaagtacttttattccaatctcatcatttattcagtttgtaatagctttttagtattttatttaaaaaaatcctttaaactactcattatttctctttttgatagtttgagtcaatgcctgtctagatttacctatagacttgacaactatattgtttgcctgtgagcattaaaaaacaatattttctgttagtggcgaactgtaatagctttttatgaaaatgtctttattttactctcagtttttagttgtggtttagttgataatagaattctaagttgctagttattttccctcagtactttgaagctattattccagtattttctatcctgtaatgttgctattagaaattctgttgctatttgggttattgtcctattttaagtaatctagtttttcttcctggatattttgatttctttatatttcatataacttcactgcaactaatccaagtgtgaatctgtttttatttatcttgcttagagttattgtgcttcttcaatctaaaaattcatggttttaaaaatgaaacctggataattctcaactattatcattttcaatagcattactttcccattatctttatttcgtctttctgaaattcttactagatgaatgttggattttctcaatccgtactctgtgttttttaacatctctttaaaatttctgatttctagtatctttcattcatatactgggtcatgtactcagggttagctttcgctgattaattctttttcaccttattgtttctgtacctctaatactttaattgtcttaaatatgcacgttgtattccctttcaggttatttttcaattattttatattctgagctgtggtttttatgtttgctatttctgttgattttcattcacaagagtaatttccttgtgcattttataatttggaattataacacaaactctctttttatttaagaatctgggaacgctgagtagttaaggaatccctccagtgtgtttttgctttgcttcatttgaatagcccagagccactatcaacctaagactgactttacattaccttttcagctcaaagattttccatgccatgaatgtagtagaaaacaaactccaggtgcccaggcctgggatgctgagctctcatgggagaattatttactgatttcgtcttctatttttccagctagaatcatggctgagacaacttccttatggtctctctgaactactggacagtttagtagtcccagtttttagtaagtgagttagcaactcacctagggtcaaattctagctaactgggttggatgactcctcctaatggcgagcgttccctcatgtaactccctcagtggccctcagttctctcctagcttctgccatgggcacaccatagatgttctttacttgaacacagccacagatttttaaaagctgtagtgtcttatcccgcatttctaaatgttattagtgggtggctctgcgtggtagcctactctgctgtcttgcagaactagaagtcctgcctcctttagctgatgggaattgtgttaatattgccccttccttttgcttactcaaggttttctgtggctattccaggtcctgggtagccattccaaaatagctaagcaaccacagattccatccagcatgtatatatctttgctctcttactcctttctccatgagttccaaagaatgggtgtggcaggtgggactgtatgaaaccgaggtactcttttataaggttgaaaattatatctgttagagagaattcactgctgtgaatgggtttactctcactttaaggtcattggattctcaccatgtaagaaaatatttgatcacaaaattctgggatgatttttccacttaaattatgtgtccattccaagtgtatttcatagccatgagtttgttaagccttctttattaaaaaataaccagggtttaatatagggtgatatttaatgacttcagtgaaaggacattccaattctatttccagaggtttttaacttccttaagtttctctgaacatgctaaattcttttataagttcctttgctctccattttttccctgaacttactgctaccttgctttaaaattttttattttctacagaaaagggtgagcaaggggtggagaaagtcattttaggctaattaaaaaataactttaaagacattactcttttattcaatttctagttattgaaaaaaataaaatatcttttttttttctttttgagacagagtcttgcttttgttgcccaggctggagtgcagtggtgcctctgcctcccgggttcaagcagttctctgcctcagcctcccgagcagctgggattacaggcacccaccatcatgcccagctaatttttgtatttttagtagagacagggtttcaccatcttggccaggctggtcttgaactcctgacctcgtgatccacctgccttggcctcccaaagtgctgggattacaggtgtgagccacggcacccggcctaaaattattatattctttttaatgggtgctttacttcaatcaaccctttttcccaaaggcttttctatttataagttctgatgcactgaggaagcctatcaagggcaggggcctcttattccaacactgttggtcctcacagaaacccatcccccctcccaccttcttcttggttactagttatcttgggtaactgaaaatattttgctcatttctgtttccacgaccaatattcgcctaataatccctacactgcttcattgcccttcttcagagtcaagaaattcattcactgctgtgtggtatgttggttcatgaaaaaacagacagacatgctgtgggaaggtctaaagctcttcctggatgtaccacaccctacactccatccaaaaaataaggcttatatctttttctagtaaaagattctacaaattattttagatcttttcctctctccctaggactttgtttctggaggaaaactagcatccttttctctgaagcccaccagtcttttccctctggaagaacaagaagccttccaccctttctacctgataggaatattcaaataagaaaataatgagcagcatgagaagcattttttctttttttggaggcagggtctcacagttgcccaggctgaagtcagtggtgcaaattcccaggctcaagtgatcattccacctcagcctcccaagtagctgagactacaggtaggtgcatgtcaccacacccagctatgagaagcatttttgggtgcctgttagtcactaggcggttgtcataccttacttttaaccttcagagctacaattaccatccccgtttgacagaggggaaaactaaagcttggaaaaagttaggtaatttactagtggttccataaaagatagagctgagatcagggtcaaagtctgtctggctcaggcctcatgttctaaacctgccttaaatccttactcttacttttcatctcttactcctaaatcttactctctttaaactagacatttctagtctctttttgggcttctatcatcccctgtaatatttttatcttagcacttgccacaatgtactgaaatcgtttaacaatgttttaatcacatccaacctctgtacctccaggacccagcacagtgcctggtatacattaaaaatgtttgaggccaggcgtggtggctcacacctgtaatcccagcactttgggaggccgaggagggtggattacgaggtcaggagatcaagaccatcatggctaaaatgatgaaactccgtctctactaaaaatacaaaaaaattagctgggcgtggtggcatgcacctgtagtcctagctactcgggaggctgaggcaggagaatcacttgaacctgggaggcagaagttgcagtgagctgagatcacaccactgcactccagcctgggtgatgacagagtgagactgcatctcaaaaataaataaataaataaaagaaatatttgttgaacttatacagtatttttttttctgttgctatttactcttttatcaccacaggtggcctccctaaatcccacagctggagaagctgagaagaacatgaacttgatgaagaattgtagtatcaagttgggaattagggacagttagaaaatgtccagactcaaatctgctattgagggaagcgccgtttgattctggtctgattcatcagaacacatttggagtcccaagagtggggaagcactttgcttcttaaggcattttgtctttgtaaacactgccatagaacacctattcaaaaatgaatagacagtggaatgaataagaaagacctcactcaacctttgtttaactgagtgctattcatttggaaactatttttttttctaataatgtaaagtagaccttgatgtgttatggaatccagataaagtagaaaatagaaaaaatttttgtcaaaatcctaatttttgtttcaatttgaattttttttttttttttgagacagtgtcttagagttctgtttctcaagctagagtgcagtggtgcaatcactgtttgctgtagccttgacttccagggctccgttgatcctcccacctcagcctcttgagtaggtgagactacaagtatgctgccatgccctgctaatatttaaagtcttgtgttttgttttttgtttttgtttttgtttttgtttttttgagataaggtcttactatgctgcccaggctagtctaaaactactgggctcaagtgatcctcctgcctcggcctcctaaattgctgggattccaggcatgaaccactgaacctagcctcaagtttaattttttatcaaatcaatatgggcatatgtttattcaaaattttaatagcacttacaatgaaaactgacacttttcatctctaagtcccactacttgtatttaaccctttaattactgtatgccttctggtatatatctctaaatagtatctttatagtgttatttcttaacttttattttcgatgttatctattgtgtgtgtgtgtgtgtgtgtgtgtgtgtgtgtatgtttgtgtgtgttttccttagacagagtctggctctattgcccaggctggagtacagtggcacagtcatggctcactgcagcctcaacctattgggctcaagtgatcctctcccctcagcctcctgagtagctgggactacaaccacatgccaccataccaggctaatgttttattttttgtaaatgcagggttttaccatgttgccaaggctggttttgaactcctggactcaagcgatcgtctcacctcagcctcttctgttggcttttttctatgggcaaaatgcattcagctttcttaaatcacccccacctacttctcccattttctcatagaatagttgtatcataaaaccttttaactgatatcagtgctcggtgtttgcacttctgagggcttgcaaatgttattcacaactgaactatgttgtgcactaaagcaattgttctcttatcgtagaattttgtttcccttagggttaataatgatttgtggtttttgcttagtttttttacacctatcaataattcagacccaaactttctaatcggactgtacagcttcatttgatttgacagttacagcagttaattctttcttgacagtcttggtcctggaagtccagtttattttcagtgcataaatctaattttttattttgtttttatgaaattgggattctactatatacacttagactgtattgtaagtgaatttttcaccaagcaatggatcatgaacatctttcatgcctaaaacaacctatttaatggatgcatagtattctgttgcctgaacataccgtaatccattaagctaattgtccatggtgacacatttacacagtgttcaatttttcacttttataaacgaccctgagtctcagactcctgaagcccaattttgcctaattatttcctaagataaattctaagcattgaattgctaggtcaaatgatatgtagattattcaagatttgacacagagtttcctccagcaatagtgttgaatttgagaaatattgccaattctgagctttgtcatcttaaacttttagtcagtcttaaagctaattattttaattaccatttatttaataactcatgagattgtgtatgtttttgtatgctgatttgatattttggctttaaattttgtgaattgcctggttatatccttcattcattttattccctgctgcttcttaataaaacctctccattttagtttgtgatcattgctttgccagacttcttttttgtattctagctcttcatctcttttcccatgctgttttcataatttctttaaccatttgcctgttcatgcatctatctaatatttattgagcacctattacagtcttcaaggaactgtgaacactatagacaagacaatgtcatcgctcttatggaacttacattttagaaaaaggagacatcataaagaagtaagcaaaagcaaaaatatcagattgtaagtgttacagagattaacactaggtaccatgctagggaatggtaaggcaaatcctttagattgagcggttaacgaaggtgtctctgagcaggtaacactctaggacactctaggtctttgtgacacaaggaagccagctatctagtacaacattccaggaggaagaaagagggtgcatcaagctccatctcctgccaatttgaagtataactttttaaaggccaagtcccagtcctatgaagcttttttgaacccttttggcccacagtgatagaggcaggaggcagagaactctcctaggcagataggggagggttcccagagaatctctgacccaccgaggtcattgtgcacagatggcttgcctaaacatgtggtaaaaacctccatcccttaacacatgtgcagtaagggaaataaatgtggagtggctcagagtaagggcccacaaaggccctggaagggtgggatggaactgccaggaatccgtgccttgtacgaacagggaacccagccccatcagcagatatgaaagtcctcatattcaacagtgaaggggggcaactggcaacctgctttcaggacccctctttttgctgagagctttccttttcacttaacaaattctactccactcactcttcgatgtccacatgcctaaattttcctggtcatgagacaagaacctggatctagctgagctaaggagtaaaaactcctgcatcaacagcaaacactgttttaatgtcatataattctcattgtctgaactacttatttggcatttaaaatttatagactcatataataattcatcttacgtttattatacaggttcagcatcctgaatccaaaactccaaaaaccaaaatgttccaaaatctgaaactttttgagtactgacatgacatcacaagcagaaaattccacacctgacacctttgctttccaaagattcaatgtatacaaactttatttcatgcacaaaattattaaaaatatatgaaattaccttcgggccatgtgtataaggtgtatataaaacataaatgaatcttgtgtttagactggggcccaaccccaacatatttcattatgtatatgtaaatattccaacatccaaaaaatctgaaatttaaaacacttctggtcccaagtattttggataaaacatactcaacctgtattttctttctcagatgagtcaatgaatttcttagagttaaagtactatatcttatatttattagtgaagacaaacttatctgatatatactagatgctcatagttatatttctgagtaatatataaaattataatcttggttgcttgctgtaggtttgtctaattcagtctttgaaagcctgggaaagagccatggcatatgaggcctttggttcaaataggctagaaagaaaggaagttgtttattgcagaatatgaaattaaattaaaaagctaaggcatttactttcttcttgatgaaacctttacaagaaagtgaatcagcagaagaaaaagtctaggcccggagtacaatttcaataactagtgtttgaaagggagcaggtcactaccatttctgtgcaagtgtgtgtgtgtgtgtgtgtgtgtgagcgcgcatggagtgtttatttagtgtcctctaggtgttttggtacatgctcgcgaatgtcaatggaagggaaatggttatatgaaaaaatatggttatcgtcttcaaaaatcatacattagctgggccttgggagaggtgagcgggtgtcctggctgagctctcagaggggtagaggaaagagacggggcaggaaggggctccttccaggccctgggttgtgctgatggtgccatctggtctctgaacctgctccaacatgaaggcacttcgagacgcacataattaatgacagcctcacagcccccaatgtcaaaagacaaaatgcactggctgttgggcacagctggaaaccagggtagtcaacatggtttgtggaaggtcccaggctggcccaggacctactgggtctctactgcccctcgcactggtctgactttttcctattctcccacagcctcctcctttatctctcctgccttcactctgctttctctccatcctgtgctgtggatgtatccatggttctaagttggaaccacctgtgtctctggaaagaccccccccgatagccccatccaccagctcctgtcaccgtgcctgacatgttcaccagtgcaggcagtgcttcagcgtggccttgccctctgcaaccagcctctggtgaagggctcatgtgctgttgggcagagtggtccctatggtttcaacaggatgactcaggttcactgagaaccgagagtcaggtgatacctggaaccgggcgtgtgggaaagactcacttccaatccaagcagacccttcacagtgggtgggtaccaggggtgagttgggcttctttgtttcaaagaaaaggctgtgtgctctctccttacctggatcccactccagctgcccccagccctgtacccacccctcagcctgcatcctgacatcttgctcattcacttcgtcatgctcacttggcaaaatcctcaaccgccagggaaagccgactttgcctcctcacacctgcgcttgaccagctgcaggcatcagggaaacatggaccggcctcatggccactcagggcccaggcctgatgcccagggacctcagccctctctcatcttcacatcccacacactctcctctctgctcagaccctgccttcctccccatccctggctctctgttcccacggtgatctgtccctgctcctgtctgaagctggtccctctccttgtgcgcttaatttcataccctcatccactgaacattgttccagaaaccctcctcctccctctcctacaaagccagtttcttattttctattgtatctttctcacaaacttaaaacatgctattttgcccattttaagagaaaacaagacaaacagataccatcttgattcctcttcccctgctggccaccccctcatttctttgcttacgtctgcagcagaatttgcaaggcctgtctacacttgctgttttcagttaccctctgtgtcagtctgcttgggccgccataacaaaataccattgattgggtgacctaagccacagaaatgtattttctcgcagttccagaggcttttcagaaaagacccttctggattttcagaaaatctcgctgactatatcttcagagtatatccagtacccaatcactcttggaagtccaagatcaaggtttgggcctattcactttctgccaagagcccacctcctggcttacagacaattaaggcacactgtcctccctggcctttcctccgagcatgctcctggagtgagccagagcaagccctctggtgtctcattcttttgttttttgatataggggctcactctattgcctaggcaggagtgcagtggcacgatcacagctcactgcagcctcaaactccccagactcagatgatcctcccgcctcagcttccaagtagctgggacaacaggcacgtgcaccatgcctacccagctaatttttttgtatttttagtagagacagggcttcaggctcaagcgatccatctgcctcagcctcccaaagtgctgggaatacaggtgggagccaccacacctggcctctgctgtctctttataaggacgctagtcctattaggtcaaggccccaccctcatgacctcatttaaccctaattacttcctcactccaaacacagccacactgaggatttgggctttgatggatgaatttgaggggtacataaacatttagtccccaataccctgctcctatgctctcttcaacccaccaaacaggctcctgcccccaccagtctgctgtaattgctcttgtcaaggtcacgcctggcctccacactgctaaatccacagggtgagtgttcaccctcatcttacttgacctctcagcagcacttcacccagctgagtactctctcctccttgattcactttcttctcttggcttctggtacaccatgctccttgcttttcttcctacttcatggtttgctccttgtcagcctgttttcctggttcttctctctcaatctcttcaagttggagcactccagggctcagtcctcaatcctcttctttctttttttttgtttttgagacagagtctcactcttgttgcccaggctgcagtgcagtggcgtgatgtcagctcactgcaaccgacagtgagtgagactcactgaaccctcctgggttcaagcaattctcctgcctcagcctcccaagttgctgggatcacaggtgcccgccaccacgcccggctaatttttgtatttttagtagagatggggtttcatcatgttgtccaggcaggtctcgaactcctgacctcaggtgattcacctgcctcagcctgggattaccggcatgagccatttcacgtggactggtgatgcaatccagtctgaagactgtgaataccacctagatgcttagcaactcccaaatgtgcctctctagcttggatgtttacagccatctccagacttgtccatccaattgccccttcagcatttccgccaaaatgcctaaaagacattgcaaactcaacaggccccagatggattcctgatctccccccagatattcacaaccttccacatctttgttgatagcaactctattctttcatttgtttagctcagttctttacaccctcctctctttctctcatatcccaatttttcaggaaatccagctgactatatcttcagggtgtatccagtatccagctacttctcacttctcattatctgcacaactcccatcatctcttgcctgcgttgctccaacagctctctttccttccaatcttgccctcttttttttttttctgtttgtttgtttttgagatgacgtctagctctgtcacccaggctggagtgcagtggcatgatcttggctcactgcaacctccacctcctgggttcaatcgattctcctgcctcagcctcccgagtagctgggattacaggtgcctaccaccacacccagctaatttttgtatttttagtagagatggggtttcaccatgttggccagactggtctcaaactcctgacctcaagtgttctgcctgcctcagcctcccaaagtgctaagattacaggcatgagccaccacgcctggcttcttatggtctatctttaacaccacagctagagagacaattttaattcagtcatatcatgccactccctgtctctgctccctgccatggttcaggtaaaccctgctagctcacttggtatgaagaacctacagaacccgacatggtgaataccccatgacctatctgaccccatttcccagtgctctcttccttgctgtcttcacatcagccacgttagccaccttccttttcttcacacaaactgggtgcactttggcctggacctgttcctctaactggaactttcttctccacataaccacatgtctcaggtcctcttctacaaacctcacctcaatggccatcctttattttttttattttttttaatggccatcctttaaattctgcaacctaactctgcctctctgtctctcaatcaccatcctcccttaccttgctctgcttccccaccatagcacccgaacacaccatgaaatatttctattcattatgttataggttgtctgtgtccctcatcccctcctttctttactagattgtaagtacgctaggggcaaatatctgtgtctatttagttacctttcaatcccaagttcctaaaacaatgtcaggcccattatagatcttcagtaattagctattgaatgaacaatgttgagagagtggggaatcttctgattagaaaatgttttcataccagtcttctgttaccacctagcaaattactgcaaagttacagcttgtaacagcacacatttattatctcacaatggcatgggtcaggagtctgggcctggcttagctgagcctctgctcaggatcttgaaagactgtgatcaggtgttggctggggctgtggtctcatcagaggctccaaatgagaactatccccttccaagttccctcaggtgattggcagaactcatttcaatgcctataggactctctgtcccattttcttgctgttctgagctcccagagaccacccacagctgcttgcctcacctgattctctccatagaccctctcatgcatggtggtatacttgttcaaagccagtaaggttgactttctcaagcacaagacgtaatataatataatatgaaagtgacaccccatcatctttgctatattctatagttaagaaacaagtcacaagccccacccacaaggactgactgattgcgggggccactctaggctccacattgccacttttctccctcttcccccacaccttcttttctcccaatactgcctccactgtctgccacaaaaaggattttggaaggtgtttcagttaggagttaggatgggttaggttatgctacagtaacaagtagcatccaaaattatttgctcttttttttttttttttttttttttggagacagagtcttgctctgtagcccaggctggagtgcagtggcgtgatctcagttcactgcaacctccacctcctgggttcaagcgattcccctgcctcagcttcccaagtagctaggattacaggcacatgccaccacacccagctaattttttgtatattagtagagacggggtttcaccattttggtgaagatggtcttgatctcctgacctcatgatccactggcctgggcctcccaaagtgctgggattataggtgtgagccaccatgcccagcctatttgttctttttttaaacatacatctgtaacaacctgatattggttcattttaaaatgtgcttttaatgttttttgctcaagccagatgcccaccacagctatggtgagggttctgctatatctcccaagcttctgggacccagactgatagagtagccatcatcttaaatgttggtggtttctgcagtgaagagaaaggcccagaaagtctcacactggcagtgacatggtccagcttacagatgccacccatcatttccacttaaaatgtccctccacccccacaagaggccatgatgtgcaacctactgttaataaagacacaagggctgagacaaagcagcactcatgactcccataggcagcttcttctccgagaaaggcaaacatggagtttgtcaataaaaaagttcaaaggagaaaattacctggaggagacttaatgtcaagcagataagagttctgtgtagctgtagagaaaatctgtaatggtctatctccaaggtaaaatattcaaaattagggagaatagattaagtgattagtaataagttagtgaaggatggctaattgctcctaaatgtgcttgcttcttctttagggttattgtttttcatctgtgtttgcacattattttttactttttttatttttttgagatggagtctagctctatcagcaggctggagtgcagtggtgcgatctgggctcactgctacctccgcctcccgggttcatgggattctcctgcatgagcctcccgagtagctgggattacaggcacgtgctgcaatgcctggctaatttttatgtttttagtagagatggggtttcactatgttggccaggatagtctcaaatctcctgacctcgtgatgcgcccaccttggcctcccaaagtgctgggattacagacgcgagccacagcacctggccagcatgttttttaatgtaccaaatctgttaaaacttttagcttccaaagattttgccaccattatttcattaatgaactctcattgctcatgaagaaggtagtttgtacctagaatggaatattacaaatgactgtccttaaaatgtagaattgtcccactcaaagtgagccagggtcattagaggtccttccatctatggttgggacatttgaggtctttgtcatattgtaatgtcgtggttggttaaatgtcatccttggtatcttggggcttagcccattgcattattgagaccgagagcattgggctatttttccaaagactcgctatcagatgaagacatacatcagatacaaaaaataaagtttctttcaactctgatattcttcactgttctaattatgcccatccttgaggaactgtttcagacatcaccatcaagagaaattcctgtttactcctagccttatgaattgccactttggtttgccaggggccagcatctgtcttctactaagtggaaacagtgctcattacatgaacacctaatacccatttcattccaagtgattaggctcctaacccaatcgttgtaatcccatttcatttgtaaggaactggtttaggacaggcatgttgctcaatcctggccaatgagacatgaggagactgtgctacacagcttctgggaaagatcttatttgtaagatatgaggcccctcctcttgctctgtgtgtgtggtacttggatgggatcccagtaactatttcagggaagaacaaagctaggagatctgtagcaaaacaaaatcgggacctctggacttatttgtgataatacattgccctattgtataaaacaacttgagagggcctgcagccactggtagccaaaagcatcctaattgacaacataaagaagacttgcaaggttcctcacctgccttcccatgacacacatcatttccatagggataccattggaagccccaaggaatgtgctactgagtctctgatcctggtgctgtttttatcagccgatatgaacaaaaggaaaataagtgcagatgggcaggcaacttcctccaagcactgcctggtggaatacatggagccacttggctgatcttcacggaggagatcgcgggtgagtgcccaccatctgttgtattaactcttgcccataatcttgatttataaaaggccctctaggattttcccacctaattgctttggatctaaaatggtcacttcaacgattacagttcctgatatatagatggatggggctggaagtttagctcaagagttaagggaagcagagaaagatctgaggcctctttctcactgtgacgggccaacaggtatttgcaaactgcaaggacatgaatattcacagcatatctgaacagaaatctttcattatctaatgacacggatcacagcatccttggcagcatttttggtcatgggatagggtttctcatcttcagcactattgacattttgggccatagaattctttgctgcgggaggccgtcctgtgcatcacaggattctagcagcatccctagcctctaccccacagatgccagtagcatcacccagttatgaaaaacaaagatgttttcgtgcattgccaaatgtcccctgccaacaacatttcccccagtgagaaccactgtcttagaactacactcaaatatcttcagattttttttaaaaataggtagtgagcatcctgtaattttcaccaccaagctatccatttatgtttattctgctaagggcgccccgtcttccctcggctactccgtccatggggtttggatggggccgactctaaccacataccgtaggtgacatgtcacgtaggcttgatcagtgggaggacagcatcctcttgaccacagtgatctgtgcgaggactgatcatgggtccagttcgtgatctgtagagtcatgttgaggactttgatatgaactcttggacttgcatgtgtgagaatataagcttggaattgctggctggcatcttgtcacccccaaagagagcctctctggaaaagcagccaatagagatgaaagtagaccaaagagaaggggagagaccagttcttgatgacattatcagagcctctaaatccagcgatgtctaatgctgggtttctctcttggatttttcgtattcatgagcccatcaatttattctgggcataagccattttgtgttaaatttcctcttatatgcaaaggatccttatggtaatatttaattagatttttaaaaatatttttaagttgatgcacaatagacgtatataatttcaggatgcatgtgacaatttcgtacattcgtatcagtgtaaagatctaatcagtgtactttggatagacatcaccttaaatatttgtctttttttaatgctagacacattcatgttattgtcttctagctattttagaacgtaaaataaattattaaatctcatccagaaacatccttgcagatatacccagaataatatctgggtaccctatggctcagtcatatagccatcctactgatctaacactgggtcttactttttctaccaagccatatagttgctgatctgcttgcaatctataaacttgctttccctttacaatatccatagccttttctgcacaagagttataggttacctggaagattacaattttcctctttgctggtttctctatgtttaggcaattctcaagaatgctttggggttgaacaatgaggctgaggacaggtagagaaattcacttaggaagaagtgggaccctcttcctctgggcttagatagtagggtaaacaggtggtgcaatggttaattttatgtgtcaatctgactgagccatggggtacctagatattattctgggtatatctgccaggatgtttctggatgagattaacatctgaatcataaaagcaaattgccctccctaatatggggtggcctcatccaatccattgaaggcctgaatagaacaaaagggtcaagtaaggagaaactttgcctgtctaagtgcttgaactggatatcagtcttctcctgcctttggactggaaattaaaccatcggctctcctgcttctcaggctttcagactcagactggaactacatcatcagctctcctgggtcctcatcttgctgaatgcagatcttggaagttctcagctgctgtaaccacataagccaatttcttataacaaatctctctctcaaagagaatgcttatacactgttggggatgtaaactagtacaatctctatggaaaatgatacagagatttctcaaagagttaaaaatagaactaccatttaatccagcaattctattgctgggtatctactcaaaggaaaagaaatcattatagcaaaacacacctgcactcatatgtttaccacagcactcttcacaatagcaaagtcatggaatcagcctaaggtccattaatggacaattggataaagaaaatgtggcacatataccatagaatactgctcagccataaaaaagaataagaccatgtctctcacagcaacatggatacaactggagtccatcatcctaagtgaaataactcagaaacagaaagtcaaataccacatgttctcacaaataaataggagctaaacaatgtgtgcctatggacacatggagtgtaataatagacattgaagatttcaaaaggtgggaagggggtgagggatgacaaattacctcttgggtacaataaacactattcaggtgaaggttacactaaatgctgagacttcatcactgtgcaatataccaacgtaacaaaactgcacttatatgcacttatactccctaaatatatataaattaaaaatctctttctctccatatttacgtgtgtttgtatgtgtggcatatatatacacacacacacacacacacacatatattatcctgctggttctgtttctctgaataactcagacgaacacagatgggttttggcagaacaagtgtgtaaggaggaaatctatgcgttaccttgattcaagctttcttgctcctacctttttatacttctccaacgtggatgaggctgccctgttaaattaacctttgacacttcactgagaaaggatcccagagctttagaaagtttcagaggaaggagtagaactggggggcacaagtctctaaaaaattttaataaagtctttatgtaattcggaatgacttagtaatttctttgaactacactcaactttctacagatttactaaacttcatatagtggacaccttgttattttcaccatcaagctatccattcatgttcattctgctaagggtaccctgatttccatggtggggggacacctttgtatctttatttcatacatagttgggaccagaactgcctggacagaagttgcctaaactgaaaaataaaacaagcatatttatatgcaaatgttatcgattcctcccaaagcactgtttttatttttgggctatgggcaggtggcattagaaagatggatgcttgttcataaaacctggcatggtttcctatgtttagagtaggaagataaacacaccctgagactctggtaagaagtaaggtctttgtcacccagaaaatgaacatatgccaatactgcaaaaaaatttagagcatttatggctcccctgacacttatccatggatttcctaaagaaatcaggctgtctctagtatggtgggtggtttcttaacagatctttgccctactcctttcagatgtcttagttccctgactaagccagagtgcttctgaagatccaatgagcatctggattcattcagtctgcatactgctggaacaaccatgcatttgaaagccatacagacccagattcgaattctggtctgctactcagttgtgtgatatgggcatgcattgccattcctacaaactctggcctgtctcctcatctgtaataatctggtacaataagctgggaggaggtattggagtaagtaatccatattctttcctcttgtataggaaaaaaaacacaaaagaaaacaaactgttttttcctctgctacccacacacagaacttctggaccccaaatgtgtggatgtttttcccacaccaagcaattctctgcagacagcaactgggtgtcctacaatttaattcagttctgacactatctacctggacttagtgcagacccctcaggttaagggcttggtcccataagagtgtccccacatcagacacccagttgcatgtcaaggctgtcacctgtacttatgaccaatggctataaatcagaagcattttgcaaacccttcttgggttagataattggctaaaacagctcatagaactcaggaaaatagtttacttacccgattactgatttattataaaaggatacaacttaggaacagccagatggaagagatgcttagagcaagttatgggagggacatggagcttccttgccctctttgggcgtgacatcctcccagccactcctccatgtgttcaatctggaagctctctgaaccctgtctttttgggtttctatggtggctttgttatgtaagcatggttgatcaaatcatcgtccattggtgattagaatcaatctccaacccctctcccctccccagaaaatttcccctgaaaattccaatcttctaatcatatgttggttcccccggcagccaaccccctattctttgggacttttcaaaagttaacctcatcaacataaactcaagtgtgtttgaaagggccctgtatgagcaataaaggatgctcttttcacctttagggctcttgtcacttaagaaattatgagggttttaggagttctgtcctaggaactgggatgaagaccaaatatatatttattataaatcaccatgtcacacctctatggtgtgttgcctctctgaacttttagtttgactaacggttctactgaattgcccaattgttttggcctcatgtagacacagccagaggctatgaagtagaacaagatttttttttttttttaaatcataatgccttaaagtgtagggtgtaggtgtgtgtatatgtttgcatgtcaaagtgtctggctgagtttccttgtttgctttacccactcattccaggcaactggtgctttctatttctgtttaggtgctaagctcatgatctcccaactactcctaccttcatacaacaaggcttcctaaagaagacctaaatctactcatgctgtttcctcttaaaatctctatagcagcatttagtacatagtatttctattcttgtgtttcaagggtaagcgtttgcatttcacaggcatcaaacagtgcctgctgcagaacgtgttcattaaatcataccctccatctatccagccttcatttcctccatgtgtacccctagattctctaggagccatggtttaggatgcctgaccagcccttccttcctcctcatatgcattagtttcctggggctgctgtaacaagtcaccacaaactgaggggcttaaaacaacagaaatgtgctctctcacagttatgaaggacagatgtcaataatctgtgtcactaggcaaaaatcaaggtgtccataggtgtgagtttcctccagaggctctaggggagaatacttccttgctgatttcagcttctggtggcccctggcattccttggcttccaatgctatcacaccaatctctgcctcctttatcactttgccttgtcatgtgtgtgtgtgcgcacacatcaattctccctctacctttctcatataaggacatatatccggccaggtgctgtggctcccgcctataatcccagcactttgggaggccaaggtgggtggatcacgagatcaggagttcgagactagcctggccaacatggagaaaccccgtctctactgaaaatacaaaaattagccaggcgtggtggtgcgcatctgtaatcccagctactcaggaggctgaggcaggagaatcacttgaacctgggaggcggagtttgcagtgagctgagaccatgccattgcactccagactgggtaacatagcaagactctgtcccctacccccccgcccctgcaaaaaaaaaaaagacatctatcctcacttagaacctggagataacccagaataacctacctatggcaagatccttgatatggcctggatgtttgtcccaaccaaatctaacattgaaatgttatccccaatgttggagatggggcctactgggaggtacttgggtcatgagtgtggatcccttatgaatgacttggtgccctccctgaagtaataagctaaggcaagagctggttgttgaaaagaacatagcatctcacttgctccttctctcatcgtgtgacatgcctgcttcccctttgcctcctgccatgattggaagcttcctgaggccctaaccagaagcagatgctggcacaatacttactgtagcttactgtacagtctgcagaaccatgagccaaataaacctctttttaaaaatttcccagtctcaggtattcctttatatatttaactaatctttagatctggttctttcctcttcccagttctggaggaggacacaaacagactaatacagtccttcacttaatctcatcttttgccacataatataatatcacagtttctgatggttagagcctgatatctttgtgggacatttttcaacctactgcactatagacagcccaagggaaggagcatgtgtttgttccaggcaaacttatctacctgaccacagctgaatgcttcaataatgggctcctgactcagaagaaccagtccacaggctggatagaaccagtcagatagtgtatgggggccggtttcaaattgctaagagagcccattagcagttaggagccacacagcaacatgatatctataaggtcagtaggtggcgtggcaagccatatccacatgggtacaagataaaggtgagggacaccccaggagcccacaggggctggtctgcagaagacaggagaaaataacagagaagttctcataggggatgcccttcagaccccttagagagggaaggctccttctcagttatgatatttatggttccaatttccccagtgatcagcccactttatcctggatatccattaagttaacttttgcatccttaaaaaaaaatcgtattatatttaaagtagcttaagttagttgctattctttgcaccctaagatcccaacccaaacactcctctccctcttttgcatggcctcagtggagccctgtattccactgagggtagattctcttttaccttaaacttccttctatttcttctagtctctcatcctaactaaagcacccctaatggcagctaccttgcacaatggcgcttagagtgtctccctgcactctcacaggggttggcagaagacacagacacccttctccacatctacatcccatctacacccatccctctcaccagtttctcattaatatcacctaaaattcaagccatttgtctgttcacttcttgccaaataatcactgctttcattcccttcctaccagaactcatctccatctcttagataagttcaaccctatatttatccttcttgttctctttatatcccctgccataatcctcattgacaacaacatccatttttaatgagccagtgactccctttgatctcatagctttcagcctcccagccttatttgatttccagctccacttcccatctgccacccacaggcagggctgcatctttagatctggttcttccctccccctagttctggaggaggagttacattggacacaaatgttgctcacctgaaatttcttctacttcccttttcttttttctttttcatctgtagacagccccagctgcgcccaatcatcctttgttttagttttctgaggatgctgtaacaaattaccacaaactggtggcttaaaacaacagaatttattctcttgcagttctggacaccagacgtttgaaatcaaggtataggcagtcatgttcctcctggaggctccagacgaggatccattccttgccacctcccgcttctggcgactccaggcattccttggttttggatgacatcactctaatctctgcctctgcctttacgtggagttctcctctgtgactcccttggatctcatagttttcagctaagagaaaaccctccttttctcttgtaaggacacttgtcatgagattgagggtctaccctaatccaggatgatctcatctcaagatccttcacttgtgtacatctgtaaagacttcttttccaaataaggtcctagtcacagatccctggtagtcataccttttgaggggccttccatttgaaccactgcacctctctacttttcaaacacaaaagacacacacatacacacagcgtatgggatttggcttcccgagcagccaacaaggatttgatgcaatctggaagtgtgacaaagaaaccagactgatgaacactgaccattgagaggcaagagaagtaggagacttggtagataaatgcctccaccctctcctgtgaacctctttccacacttctgggaaaggcatgtgtgctgagagaacaagactgctaggccaggctaccttccaagctcttcatgaagtgaatgcccacaaggtaacgacctccttccctcccttcactgctcatcgactccttgttcttctcaaacttttgagccttatttcttgtctcaagctttgttttctagaggaatctgggctctggctcatgccctgtgtttccattgaacaggaagtgttgcaggtcatttccccagcataagttgcttggtttttgtaccacttgacttgtgcagaccacagatgattgcaggagagaccagtaggctgcctagtgccccgcaggggtcttggaactgcagccctgcccggcaggggcttgccaaaccagagagagaataactagaacaactggaattgctgtcagaagctgtgtagatggagcataccccatggggagagggacagcagaagaaggagaagctgaaagacagggaaaggaggcaggtgcagaaacagagaacaactggcctacggtaaggggatagaccagaggtgttccctgctggagggtagaagagaagcagggtgatcagtctctgtaagatctgattgagcagctgtgataaggtctctagagggattagggtggctgtggagagtgtgctctgtgcctcctctgccctaggcgtccttacaatgaactcctatcaccagaggtaagaggtcaccctgactccttgcagcctaaaaatacttactgaacacaagtagagagtgttggtccctaacttccctggagcccccactaaacatgttcttggcatcaccagacattgaatcattgcaccattgtcccctcccacaaataggccactgtcattttacccagttgaccactgagtatgacgattatgtcatgaatgtaatcatcctaggctttcatgtctcagtctttttctctgtcatgcctcacagatttataaatatcttcttccctctacttttttcattgtagtaaaatatacataaaatgtactattttaactatttttaagtgtactactcagtggcattgagtgcgctcaaaatgttgtataatcattgccaccatttatttccaaagctttttaatcatcccaaccagaaaatctgtatccattaaataataactccccattccttcctacccaatccctggtaacctctattctattttctgtctctatgaatttgcctattttaagtacctcatataaaaggaatcatacaatctttgtccttttgggtctggcttattgtacttagcatgatgccttcaaggttcatccatgttatagcaagcaaaagggctcatatatatttgcattcatatgcatatatacacatgcatattttaatatatatatgattgtatgtttagattacattttgtttattcatctgttgatagacatttgagttgtttccaccttttattgtgaataatgttgctgtaaacattaatctacaagtatttgtttgagtccctgctttcactttgaggtacataagtaggtgtagaattactaaattatatggtaattctatgtttaactttgtgaacaatgccaaagtgttttctccagcagcagcacaattttacattcccaccagcaatatgtgagggttccaatttctccacatctttgccaacaattggtattttccatttttaaaaaaattggctgggcacggtggctcatgcctgtaatcccagcactttgcgaggccgaggtgggtggatcacctgaggtcaagagttcaagatgagcctggccaacatggtgaaacaccatctctgctaaaaatacacaaaattagactggtgtggtggtgggcacctgtaatcccagctacttgggaggctgaggcaggagaattgcttgaacctgggaggcagaggttgcagtgagctgagatcacgccatttcatttcagcctgggtgaaaaaagtaaaactctgtctcaaaaaaaaatttaaaaattatagtcattatgtgtgggaagtgatgtctaattgtggttttgatttgcatttcccccagtggccactgatgttcagcatcttttcatgtacttattggccatatgtatacttctttcgaggatttcctattcaagttctttgctcatttttgaattgggttgtttgcatttttgttctcgagctgtagaagttatttacatattctagatattaattcattattagacatatgatttgcaaatatttttcccattctgtggattgtcttttcattttcttgatggtattctttgatacacgaaagtttttaattttgatgacatctatttatctattttttccttttgttctctgtgcttttgatgtcacattgaagaaatcactgccaaatccaatgtcatgatttcccgctaagtttttttgtaaaacttttatagttttagctcttgggtttaggtctttgatctactttgagttgatttttgtatatgatgtagggtaagggtcgaatactcctttgcttagaaatattcagttttctcagaactatttgttgaaaaggctgtcttttcatattgattgatgtggcacctacactgaaaatcaactgaccatagacaaagtgttttgttttgtttgtttgtttgttttgcctctctattctattccattggtcgatatgtctgtctttataccagtatcacattgttttcattactgtagcttttagtaagtttttaaatcagaaagtgtgagcccctaagtttgttcttctctttcaagattgttttggctattcagggtctcttaagattccattatgaattttaagatgggtttttctatttcacaaaaatgccaatgggattttgataaggattgaattgcatctgtagaatattttgggtagtgttgtcattttaacaagacaaattcttccaaactatgaacagatgctgtctgttcatttatgtgtgtattcattaattacttttagcaatgttatatagttttcagtgtacaagtccttcaccttcctgttgaagtttattcctaagtgttgtattcctttttatagtaatgtaaatgaaattactttcttgatttccttttgaggttgcttattgttagtgaatagaaatgaaactgctttttgagtgttgattttgtatcctgcaatgttgctaaatatatgtattagctttagaagtttgcacgtgtatatgtggattttttaagagttttttacatataagatggcatcatctgcaaacagattatttcacttcttcgtttttgtctcaattttaattttttaatatattttttcttttctagttgctctgtctggaattttcaatactatgttaaataggagtggtaaaagctgacattattatcttttgcctgattataggggaaaaggtttcagtctttcaccgttgtatgtaatgttaactgtgggctttcataatggcctttatcatgttgaggaagctcatttctattattcctagtttactgagtatttttataatgaaagagtgttgaattttctcaaatgtttgttctacatcaatgaaaatgaacatttaagtttttttcttcattatattaatgaggactattatattgattgattttcatatattgaacccttcttccattccaggaaaaatcctacttgatcatggtatataatctttttaatatactgctgaattcactttactattattttattgagtagttctgcatcaatatcgaataattttgctgctttctgtaagttttagcatgtagtgttttcattttcatttttctcaagttatctttaaatttcttttctgatttctctttgactcattcattggttttttaagaatgtgtttaatgtgttaagaattgtttgatttccacatacttgtgaatttttctgttttcactctgtaattgatttctggtttcattctagtgtgattagaaaagatacttagaaatagtttaatcttttctattgtgattagaaaagatacttagaattagtttaatatttaaaattgattgacttctttcatagcctaacatatgatctatcctggataatattccacatgtacttgagaaaaatgagtgttctgttgttaaatagagtattctgaatgtttgttaggtctaattggtctatgttgttgttcaaatcttctatttctttgttgatcttttgtatggttgttttactcattattgaatgtgggtattgaagtctccaactgtcactgtagagctgcctatttcttccttcaattctgttaatatttacttcataaattttggggatctgttgtttggcacatgcatgtttataattgtatatccagttaatgaattgaccattttattaatatataatgctcttttttgccttgtaacagtttttgacttaagactgattttgtctgataacagtatagccactataactctcttttggttcctatttgtatgatgtatcttagtccttcctttcacttttgacctattcatgactttagatctcttttagacagcatatagttgagtgactttcttttcattttgccaatcactgcctttttattggagagttgaattcatttacatttaaagtaattactaataagaaaggacatctgccattttgctatttgagttctgtgtgtcttacagcttttcttgtccctcactgtctctattactaccttcttttgtgtttagctgattttttttttttagtgacatgttttgattcccttctcatttctttttctgtatattctatatatacttgtgtatactttatttgtggttaccatgacacctacatttaactctctaaagttataacaatctaatttgaattgataaccattcaatagcatataaaaaccttgctcctatacaactctttcttcacctgtttatattattgatattacatattacatctttatacactgtatgtccaaaaacatattttaactatttttatgcttttgccttaaattatgcagaaaaaaataactggagttataaaccaaaattaaaataatactggcttttgtatttgctcatgtatttaccattaccacagattattgttttttagtttttgtttttgagatgcagtctcgctctgttgccaggctggagtgcagtggtgcaatcttggctcactgcagcctccaactccctggttcaaggaattctcctgcctcagcctcctgagtagctgggattacaggcacatgccaccacacccagctaatttttgtatttttagtagaaacagcatttcaccatcttggtcaggatggtctcaatctcctgacatcatgatccgcccacctcggtttcccaaagtgctgggattacaggcgtgagccactgctcccagcctattgtttctttatacaatgtcaagttactctctagtatccttttatttcaacttgaaagattccttttagcatttcttataggactggtctagtggtaatgaactccctcagcttttacttatcttggaatgttttaatttctttctcattctcaaaggatgccagatatggaattattggtcgatactattttcccagcactttaaatataccatccccctgctcttaatttgtgttgatgtaagtctctttgagtttaccctacttggagcttgttgagattcttggatttataggttcatgcatttcatccaatgtaggccatttttagccattatttcttcaaccttatcatccctttatctctctgttctcattattgggggcccctaatgtaatgttggtctactctatcatgtcccacaggtcccttaggctctgttcacatctttttattcttttttatatctgcttcatactcagtaatttcaattgtcctatctttaagtccagcagttctttcttctgcctgttcaaatctgcttttgatcccctcttctgatttttttttaatttaagttattgtacttttcttctccagattttctgtctgtttcccctttataattcctttctctttaatgatattctcattttgttcaaacattgttttcctgatttcattttctgtgttctcctttagcccttcggacatacttaatgcagttgtcttaaagtctttgtcaaaaaagtctaaatgtctaggattccttaggacaacttttgtcagtttattttgttcctttgaaaagtgggtcatgttttcctatttctttttatgctttgtgatttttttgtttaaaattggatatttgactattattatgttgttaactctgaagatcagattttcttcccagttttctgaaggtttctgtttggttagttttgtttgggttttttgtttgttttgattgttgaaggctacaatagtccacttgttttgagacttttccaaaccatttttgtgacaacaattacttgtcattcgtggtcatttaagtctctaattttttttttgcttgtgttcagctaatgattgacagagatttccttgaatgccaggaggtaaaacaaacaaacaaaatacatgcacacaagcatactcattgataaaaggggaaaaacatctctcctgtgtttgcatattggctttgtgctaaagcactctttcaacactcagctaggctttcactaagcctatggcaaaatcttaaggtctttttaagtcttctccaagcatacatcttgacctggacatgtacatggctctctcaattcctccatatatatggggcagtttttaatgcccaatttcccaaagaatctcaccccaggcacctgtgggtctttagtccaccttgcagctttatgagcagtgcctactgttcttcccatctgagttccaagttagctgaagcacagatgagtgcctggcatgtgtccttcaagtatcccacagacaggttaaaacagacacacacaataatttgtaaacaaggtctactctgtttcctctggtttgaagtacctgggtcccaaaatcggaacatgagctgctaccacctacttcaaggccaaaacaaccactctgccagggaagagctagggtgagggcaagtgaaaacgccagagatttgttccactattttgaatctgatgtgtgtatttgttttaaatttgtcattctcatgagttgtgtaaactcttgacattttctcagagttctcacaaggttgattctgtctgtttctacttgttttttcaacgtttctatacgggaatgagagcttagggcttcctagtctgccattttgttctgctctttcctccagttttgccactactttatgtgaaaaagacaaatagcattttctgagtatcttctatgtgactgtaagcactaggcatattgcagcaaatgagatatatgcaattcctttcctcatacagctttgcttctagtgggagagaccagtaaacaaagaacagagataattgtaagttctaatgtgtgctatgaaggggcagggggaaaaactcatatagtatctaatataatatcaggaatgacaggattggtgggggctgagggtgggatttttctgggattccagggaaagtccctctggactgaggatatttgagtgagatctgaaggctggaaagcagaaaaccaagtaaagagtgtggataaagaacaccaggcaaatggatggcactggaaatcccatgctgtatgaacctgcttgtaggactgcagggcaaccactgaatctgcagggctatgagtaggagaggaagacacatgaggaggcagggtctggacagtggttgaaggccacttgaagttcagtgggaagttgtgtgttaagcaggagaatgacatgctctgattgatcttttttttttttttttttttttgagacagagtcttactccgtcacccaggctgaagtgcagtggcgcaatctcagctcactgcaagctctgcctcccgcattcacgccattctcctgcctcagcctccagagtagctgggactacaggcgcccgccaccatgcccagctaattttttgttttttttttttttttttttttttagtagatacgggggtttcaccatgttagccaggatggtctcgatctcctgacctcgtgatccacctgcctcggcctcccaaagtgctgggattacaggcgtgaaccactgtgcctggcctctgattgatcttttaagcttacttgttgctgagcggagaactgattggagggtggtattatgggagcagggaggctacctggaaggatgtttgtaatagtccagagagatggaatggtggtctggactaaggtggtgatagaaatgcagagaaagggaagatgtggctacatcatggtggaggatgtggcagggctttctgatagaatggacaggatagatgagaggaagggtaagaaacttaagaataactcctgattttctatacgtggtgaatagatggtgatgcactttactgtagtgggggaaatttgagggaagaaagatttctcttgatttctcttgaaacatctataaaagctctagtggaaatggttagggagaacatatgaggctgtggtttagacatgagaagaccaggctggagatgtcagtgtggaagccatcaaaacatagaatttatcaaaacacaagaattgatgagatcacctcgggagagtgtatatgaagaaaagaagagggaaacctagaaaccaccattcagaggccaagtggatggggggaggcagcaaaagaatggcctaacattagctaggccctaaaacatatccagatcagacctcctgagtgccaggatttactgaaataaactttctccagaattactcaatggggtccaatggctggaatcatgacttagatagcatctgtgattatactcaggagtcactgatgccaaaggcagatggaaggtcatggaatgctgctctaaaagcttggtaaatgctttctgtaggggcaaatagatcccccaggcctcttccagaactatgctcctataacgccaacttgctgtgcaggaattggtgaggcttcctcagttgcttgaggaaatatttgtttgtttttgagacaccaaaagcagataggacagatggagggagagagagtccttgtatacagctgcctcagtttctacctgcattcactttttatgttcatgaactaaattggtatgtctttttccattttgcaatgaatgtatatatttataatatctatacttaattatatcaagatcgttctatagactgtgtatgaaaacatgccctcgggcgggtctcatttccaactgagtctctgttgccagcacagtgcccagcccaaggagtaaataaaggtcaaatgagtgagtaaacaaataagtgaatggaggctttgagctagcggaggatccagaaactcatttcctttagaatctcaggggtctgaagcagactataaactgatattatccgtataagtatttaaatggacattaaaagttcttactctaatgaaataatccaaggcacttaattgcttttatgactttgaggaacaacaatttgttggccgtttactgtaggtctaggattgtgccagtcactaggggcaggattggaggagggtttacaaagaagtggaagaaaactgatcttcaggttgtgaactaagatgacatagggaagaaaaattaacagtacgggagaggaatggctgtgtcagtggtggtctgtggtctatgcatctctctacgaggagacttatggagcaagaggctctcgtgtgggggaatagtgacaatgttatagtctagatgacctgcagcaggagatcacttcactttgtagaaaattggtgttctcttttataaaaagggatgttttggctgggcacagtggctcacgcctgtaattccagcacttagggaagctgaggcgggcggatcatgacgtcaggagatcgagaacatcctggccaacatggtgaaaccccgtctctactaaaaatacaaaaattagctgggcgtggtgacacgtgcctgtaatcccgctactcgggaggctggaggcaggagaatcacttgaaccagggagttggaggttgcagtgagctgagattgcaccactgcactccagcctggtgaaagagcaagactctgtctcaaaaaaaggaaaaaaaaggacgttttgattctgtgcacacagaaatcctttccactctaacactgtcatttctctttgtcttcaggaactatctaaaaggagggaacaggggccagaggttacaagttggagttctactgtcctaatcgatggtgcagagttgtgtttggctcatacatgaatggctccacggctcttttcaaattttatttcaaatttgtaacacttaaaatcaactcatgtttaaaattcaggtgatttcagtaactccagttttccagctttgctggaaaaatcagatctgacaacaccaggcaaataccagtctggaggtggtcacactgctttcctgttgatcttgggcctcacccttgtttcttatctggcctgtctgtgtctgtagaccaagtttcaaaacagatgtagggaacagaaggaattcaaaatgtaacccgcaggccagtgattctcaggggagcatgaggatgtgggtgtgagtggaggagggctccccagtggggtagaaacctagcaagattttccaagcctggaggttctgatggtaccctcccttcatatccttagctgagaatcaccgggtgtcataagcaacagcaaagagcatcccatcagggcaggtgagggtcatgtactgatcatttcagtgatgatagcaagatccagtgttcaccaaatgcctgcatgggcctgtcactgctctaagccccttacaagcatgattgaccccattttaccgaggaaaaggaggcatggagagattagtagctttccaaagagctctggatggcaagaacagagctagatagtctcatttcaggtgaaaccaaggtgaagcaagttaacacaagaacaaagctagggcagggtgtggtggctcacgcctgtaatcccagcactttcagagaccaaggcgggtggattacctgaggtcaggagttcgagacgagcctggccaacagggtgaaaccccatgtctactaaaaatacaaaaattagccgggcatggtggagcgctcctgcaatcctagctgcttgggaggctgaggcaggagaatcgattaaacccgggaggtggaggtttcagcgagtcgagatggtgccactgcactccagcctgggcaacagagagaggctccgtctcaaaaaaaaaaaaaaaagagcagagctagatagtctcactgaaaccaaggttgagggccacagatgtgcacaaccaagcggccccacaggtctttgagtgggatggcgacaggcaaaaattggtgttggtgaagattgatctggatggccagaacagagcctgggtactacatactaattgaattgttgataatggctgacaaagcaatttcctgccaatcacttttaccattaacctcctcaagatgaattctgaaggaagccaaataagagacaactctgggttttgtaagtcaacctctttttttgatagattcacatttgtgcttttctgcctcccagatagaaacaaaggttaaaaatgtgattgtggcctccggaagtttaaaagctgggcagagcgctgtggagacaaagcctgccattcagttacataactgattttcatggatggcttatgaaagtcaacatcattattttatacttacatgcttacctcaagaaaagtaccaggcgttcctatttcaaacgggtttcccaaaagctcgaagtttggggaatcataaactgctaatggaagtcaatgggaaaatcatattccttgcatggccaatttttccataatgcacttagcaaagtgaaggagacaagtctagcatttatgacgacaagagactcacttatctattacttcagcctgtttggagactgctgggaattgaaaatgaggaataggttacaaaggtgatttccagagggaggcagagtggaaaatggagaagaatggtcagaaatgaaaggagagaatgcatcagcagtgaggcgagtgtggataacatttcccgtggaaataaagggactgtgacacccagcatggaaacctctggaatcagcagccctttggatgagaaatggagcaagggatagtgagcgtttgcatttattcaaaccaggttggcgaacctggcgactattcacaaaacagggtagcaaacacctacctggctgcagggaaaattccagggtgaacatatctcaagatttagaaggaatcccacattatatttccatgggtttggtttgggaaaaatccctgtatgacttcagcaagtctgtggctgttggtggatcaaatacaagggccaataacttcttgccactttaagaggaatcggattgaaatgtatgtagacctttgggaggtaggtaataagaatcactgatgcctccacatacctctgaggattttctcttcgattaaaatgacaagattcctttttagccaatacataagtagaatctggttcaaaggctctcaaactgccacctgctacttcaaaagctctttcaattccctgagcaatttacttcagggcaattgaactcctgagtgtggtttccaccattttctaaccaggctgtctctgtgtgaaggaagaatcagtttctgcaggcaggttttcagcacagacctgttcatgtaggtgtttgctagcctttatagctgtgacggtggaggtggaaaaaaggtcccattttgatggctgaaaaatacagataggccaacattttaagagcattgataggaaatttggattttcatccaatttaaaaaattaaatgttgaaccaattgaaaattccccatccccagcagtactgcagataaatttgttatcctataaactgggctcaagtgttagtaaaaacactctgaagtaccctaattattaggaaaacacaaatcaaaaatacaatgagatgccaccccactttgattagcatcattactagttaaaaaaaaatacaaaaaaatcacaggtgttagtgaggctacaaagaaagtggaacgttggtgctctgtgggtaggagtttaaaatggtgcagccactgtagaagacagcatgttagtttctcaaaaaattaaacatagaattaccataggatatagtaatttcagctctgggcatctgctccaaaaaagttaaagcagggtctcaaagagatatttctacatctatgttcatagcagcattcttaacaatagctaagccgggcgcagtggctcaagcttgtaatcccagcactttgggaggccaaggcaggcggatcacgaggtcaggagattgagaccatcctggctaacacagagaccgagaccatcctggctaacactatgaaaccccgtctctactaaaaatacaaaaaaaattagctgggcgtggtggcgggcgcctgtagtcccagctacttgggaggctgaggcaggagaatggcgtgaacccaggaggcagaggttgcagtgagctgagagcgcaccactgcactccagcctgggtgacagagcgagactccatctcaaaaacaaaaccaaaaaacaatagctaaaaggtggaaacaatctagtgtccatcaatggatgaatagataagaaaaatgtggtatatacacaaaatggaatattatttgtccttgaaaaggaaagaaattcagacaacatggataaatcttgaggacattatgctaaatgaaataagccagttacaaaaagacaggaattgtatgatttccacttgcatcaggtacccagagtagtcagattcctagagacggagagtagaatgggggttgccgggggttagggaagggaggagtggagaattgttgcttaatgagtatggagtttcagttttgcaagatgaaaagagctctggagactgaatgtgaacaatgtaaatgtacttaacgctatgaactgtaaacttaaaagagggctaccacaactaaaaataaaaagtaaaaataaaaaaataagaaagaaaagcaaaatgctaagggagtaattctcaaacttgagcacacagcagaagccacctggaggtcttgttacagtaacacagagtgctgtaacactgcttttgaaccagttcccaggtgatgctaatactgctggtccaaggagtacactttgagaaccaccgctccaagggttccataaagtgtatcttttctctttcaaaaacaaagggaacttgctggattgtttgcaaacaacccatggtacctttgtaaaaataaccacattctacaaactgaaatttaattattgctgaacttgtacaatgtgtcaggtatattattaggcaccatacacatatactttaatttaatccgcccaagctaatctattgattcaacaaatatacatggaaaacctgtaagcaggtattttcctagtagaggagaaagatgatccaatgaatgggcaaacaaataacattattaaatattaccaacagtactgggaagaaaaaaaaatggagttgagctggagaagacctacctttaataaaatgatcagaaaaggaccctgaagagtggtatttaaacggaaactaaaggttaagaaggaggcaatcattcaagattgagggaaagggcagttacaaggagaggaattagcagtgcaaacttccagtgaggaggaaaaacccttgggatatttaaggggttgaaataagtccagtgtagctggattgtagtgatcagctagagtgttgacgggctgagttgggaaggttggtaggagctggggtatgcagaggcttataagctgtgacacagtgtgaggacttgaagtatttggggaagatactggtaacttataagcagcaaaggtgatatggtgaggttttcaaagctcctactggctgtaattggaaagtgggattagaggtgggccaaggatgaaaagagggagatgagttagaagactgttgcacaagaccagggaagagaagagggacacttggatcagaccagtggcaatgatgatgaagagaagagtggagactcaagctttgtatctcagtggaactgacaagacacgctggtagactggatatggaaggtggagggaagaaggaaatcagagattcatctcaggtctctagcttgaaaaattatgagagataaggatgaagggagcaaaattggggtgaaatcaagattcctatcctaagtaaaatttgatgtttctgtgagatgtccaagtggaactattaataattcattgggtgttatgagtctagacctcagaaaaaaagtctgggctgggcgtttacttttggagtaatcataatatggaaaatattttaagccattgcatttggcaaaatcatctaggacaggacttctcaacctaggcacttttgacttttggggccagataattcttggtggggttggggagggggcctgtcttatgcattgtaggatgtttagcagccctctagatgtcagtagcccttttcccagttgtgacaaccaaaaatgtctccaggcattgtcagatgtcctttgagaagggggtgaagacaaaatcgcccgtgcttgagaaccactgagctagggagcgagtatggaatatgcaaaggaaatgaagatgagatatagtgaacagttaggtgtgtcaacttaaaaggaaacatagaatctatacatttggaaaaggagactatttcttgtgaagggttacagcctacaagatagccatgccacaggctgggaaacacaaagcctgaaagacaggcactttgaaggaggaggggttgaagtaggagctttatactggtcaggttgactaaacatacctattcaacagattacgggaggagctatgaatatttacaaaggtggtcctggcacatacatcctgaacaaacatgcgtgtaacatataacccatgttcactttgggtggagactgaatgtattactgtgttacaattaggccctaaaagtcaaaaggccttttcaggacacaaagatactcaagtgtgcaatctctgtcaactggccagcaccagtccatgatcagtggtctcatcaggagaaagctactgaaatcagtctcttgtccaatcaaagctgtagtcacagctggggtgcaacaaggattcagttagtcagcgtcagtgagctggatgagttttaattgttttaatattgtttatctcgaggccagtgcttgtttagctgctagagaaaaagaataaccttgtggtagttagaacgtagtttcttcttgaaatgtagggtacatgaattaacccttgcctggcatggccttctgtcctgtttataatttggtggtggttgttgtttttgagacagggtctcactacagttgcccaggctgtagtacagtggcacgatcttggctcactgcacccttgaagtgagcctcaacctcctgagttcaggtgatcctcccatctaagcctcccaagtgttgggactacaggcatgtgccatcatgcctgacttattttttgtatttgtagtagagacaaggttttttctacgttgcccaggctggtctcgaactcctggactcaagcaatctgcctgtcttggccttccaaagtgctgggattacaggcatgagccaccatgcctggcctatactttggtatctaattgccacaaagagttcattatgtcagtcttataatctctattttaacattaatattggctggttgtgatggctcacacctgtaatcccagcactttgggaggccaaggtggggggattgcttgagtccaggagttcaagacaagcctgggcaaaatggcaaaacctcgtctctatgaaaaatacataaattagccaggcatggcggtgcatgctgtaagtcccagctatttgggaggctgaggtgggaggactgcttgagcctaggaggtccaggctgcagtgagctgtgatggtgccacttcactccagcctgggtgacagagtgagactctgtctcaaaaaataataataaaataaaaacattactgctgatcagttgtgtctaaaccacagaggggaggggggcataatgaggcatgtctgacttcccatcccatcatgactgggaactcagttttcagttttttctgtggtacccttggccaacagggagttatttcagttggtgagggggtggttaggattttatttttaatttacagatggagaaaaaaaaaacacagaagattgtgaggtatcaggagccaaaagaggtgactatcaaggaggacacaaaggtcaacagtatctaatgctgctgagagcctatgcaagataaggacagaaaagtgtgcactggctcctgggggaatcaggggactctgggaagatggcatcatcccaaatgcgtgcagcctcctcttccctcccaaactcaacaccaaactccttccaagagacaagaagcagccacaagcaagtgtctgaattttgctactacagactcatggacagttgggagagaaaaatgctctccattcacatgagggttcctgggcttcctggctccagaaagtgtaaagaggtggcccaagtcatctctgtccatgccgatgggagttcaaagacatggagtcttccttgtatgtttctgtaggggtttggcaaccttgccttgctggctgtaggctcttggggacaggctgctgaccctgtcaccactcaaggtggcaccatttattgtcctacagcagcaagaaagtagccccattgaaaggacatggggaagagagtaatacaccaaggggacccagcaggtggagagagaaggagcaagcagaaccctcacaagagatccttaaaaaataaaactcttggggaagacaagacaaaggagcacagtttaggacatttaagtataacacaaacaaaacattgtgaattttttgtttgtttgtctgtttttgagacagagtttcactcttgttgcccaggctagaatacgatggcacgatctcggctcacggcaacctccacctcccaggttcaagcgattctcctacctcagcctccagagtagctgggattacaggcacccgccacctcgcatggctaattttgaatttttagtagagacggggtttctccattttgttcaggctggtctcgagctcccgacctcaggtgatccacccacctcggcctcccaaaatgctgggattacaggcatgagccacagtgcctggctgaacatggtgcatttttttaaacccataatttggaacaaaacattcagtagatggaccacgtagacactggtgagttccaaacaagttgcttggaagatcaagtgaaagaaatatttccaagaccagagcaaaaactccacaggaaaagaaaatagggaggaaaagatggaatacttggagttaagtcaaggagttataacaagtaaaaagtagagattccagtgggagtaaactgaatggaaggggaggcaataattcaaccaataagagggaaattaccttaagaggaagatttgactctctgtgttgaagaattttactaaattcctgaagggattgtcaggaactttacctatcttgagaaatccgacaactccaagaacaaagagaaatacttacaagcttctagataatgcagatacatagaggcaaaaacccaatcagactggcacataaccaaaagtttataaaagtacatttacagaccaccaagtttttgaaaaatttattaatttcttgcatatggctataacaaatttaaagatatccactgttaccattctcaattgctgcataagaaaccactcaaaacttagtgacttaagatgacaatgtattgtttcttgtgaccctgttggctagctgggtagttcttttatgcatcccacttaggtggcaacatttacctggaggggcagttgggaactgagctcaattgagtctcggaggcagatgggctggttgggcttctgtctccatgggatctttcatcattaaaaaggtggtggcaatgttccaacatgccccaatgcacaagtgcttcttacaactccacttgagtcatgtttgctgatgtgtcattggacaaatcaaggcacatggtcaaacctgtgtcaaatgaaatcagtatgggagatgaaaatgtaagggtataaatgccaagtgctgtggattaatgaggtgcgttaatttaacaatctaccacaaccaccagaagaataaagatacaatctataacttccaaatcaggaaaagaacaaggggtggaaatgcagaaaacacagttcaacacaaagtagaaagttaggggaaaaggagcaaatataaagggtggcaaataacatctcaaataaaatggcagaaataagtccaactatttcattatttgcaatataaaaagggattcgattgtttctgtaatactttattcaaaaataagttatgaaggccagtcacagtggctcatacctttaatcccagcactttaggaggctgaggcaggtaaactgcttgagcccaagagttagagaccagcctgggcaacatagtgagaccctatctctacaaaaaataaaaaacaaaattaggtgtggtggtgtgcctgtagtcgcaggtactcaggaggctgaaatgagaagactgctagagtccagaaggttgaggctgcagtgagctgagataatgccactgcactccagcctgggcaacagagcaagaccctgtctcaaataataaataaataaataaataaataaataaataaataaagcgaaaatgattggacaatggaatcacagatgtttgttatatcactttctgtgtttttaaaaactattttctaattatttctgaatactttctttaaaatgtatcatttaaaactgagtaaaagaaaaaggaggaattatattttaaattttattaagcagtgaagagtagacaatacaaaatgctagcaaggatgtggagcaacaggaactcccgtttgttgttcatgggaatgtaaaatggtacagcccctttcaaagacagtttggcagttttttacatattctgaccataggacccagaaattgctctcctttatctttacccaaatgagtgaaaacttacatcaatactgaaaactacccatggctgcttatagcagctttattcataattgccaaaacttggaagcaaccaagatatccttcaataagcaaatggataaacaaactgtggcatatccttacaatgcaataaaataaatgcactatcaagccctgaaaagaggacatagaggaaccttaaatgcacactactgagtgaaagagacccatctgaaaagactacatcttgtatgattccagccgtatgactgtcttagttcatttatgctgctacaacaaactgcctgagactgagtaatttacaaggaacagaaattttttcttattgtcctggaggctggtagtctaaaatcaaggtgttgatgggttcggtgtctggtgagggctgctctccacttccatgacattgccttgttgttgcatcccctgatgggaggaacacagtgtcccccatgggagggagagaagggatgaaaaaggacacgctcataagagcaccaagtaccattcatgagggtagagccctcacagctccatcacctcttaaaggccacacttaataccatcacattggccataaagtttcaatatatgaatttggggaacacattcagatcatagcaatgtcattctggaacaggcaaaaatatggagacagtggttgccaggggttagtagagagggagggatgaatagtcagggcacaatttttagggcagtgaaactgttccgtatgctggatacgtgtcagtatacatttgcccaaacccctagaatgtacaacaccaaaagtgaaccctaatgtaaactgtggactttcattagtaataatttatcaatattggctcatcagttgttaacaaatgtaccacactaatgcaagaagttaataacaggggaaactctgtgtgtgtgtgtgtctgtgtgtctgtgtgtgtatgtgagagagagagagagagagagagagagagagagagagatatggtttgtctctgtgtccccacccaaatctcatctgaaattttaatccccataatccccacatgtgaagtgagggacccggtgggaggtttctcacgatgttctcatgatagtgagtgagttcttgcaagatctggtggttgtataagtggtggtttccctgctctcttctctcttctgccgccttctgaagagggtgcttctttccccttcgccttctgccatgattgtaagtttcctgaggcctctcaacccatgtggaactgtgagtcaattaaacctctttattttatgaagtacccagtatcaatcaggtatttctttatagcagtgtgaaaacagactaatacagtgtgtgtgtgtgtgtgtgtgtgtatgtgtgtgtgtgtgtgtctgtgtgtctgtgttaagggagatatatgggaactctctgtactttccactcaatttttatgtaaaatgctctaaaaaataaagcttattacaaaaaaaagtgatgaggaagaataataattccctaactctcaaagaattacaaataacatgacccttctgaaaaacaaataagattaaagaatagacatgttcatataaaatgctaaaaaacaacagaagaaatagaaaagcaagctgctgacagacagatggcagaaaagagtgaaagagaagaacaaaatgacaaaataaaaaaagaatgaaaataattgaattgttcagagatcaactagacaggccaaaggaaatgatacacacattacaaattggagaacatctaagatttgaaactattatacagaaaagtataagcatgaaagacaaaggagatatattgggttcataattagtatagtcatatattgcttaatgacaggaatacctctgagaagtgtgtagttggtcattttgttgttatacaaacatcacagagtgtatttacatgaacctagatggcatagcctactacacacctaggctatatggtacagcctattgcttctaagctacaaacctgtagagcatgttactgtactgaatactgtaggcaatcgtagcacaagggtgtttgtgtatctaagatacagtaagaatagtatttttattttttttattattttactttaagttctagggtacatgtgcacaacgtgcaggttttttacatatgtatacatgtgccatgttggtgtgctgcacccattaactcatcatttacattaggtatatctcctaatgctatcccttccccctccccccatcccccagcaggccctggtgcgtgatgttccccaccctgtgtccatgtgttatcattgttcaattcccacctatgagtgagaacgtgcggtgtttgattttctgtccctgtgatagttggctcagaatgatggtttccagcttcatccatgtccctataaaggacatgaactcatccttttttatggctgcatagtattccatggtgtgtatgtgccacattttcttaatccagtctatcattgatggacatttgggttggttccaaaaacacagtattataatcttatgggaccactgtcttatatgtggtccttttgttgttttgcagcacatgaccacattctgaaaaatagaacaaaacaagcaaaatagaaaaaaaaaaaaaacctaaaaatatactccttaagtagtgagtaaaccataaagctggaaacatattatgtttcaattaaaactgatatggaaaagccacatcaaaatagctgctagtgaagttattcagctttaaaaacagcagataatttgagtcacagttttggaaaagcatgttttgcaaacttcttcccttgaattcaactgtaaagatgccaccgaagcaagagatcccagactttagggtggggaaaacaccagaaaccttaggaaggtagaaggtttttgtatttcattgtggggaagaaaaatggtacctaaagtagaagggggccagttaccaccataggaaataggtgaaggaggagctttgttcccccatcacctcccctacatgtaactacaaggtaaggaagcagcaattagaaattacagtgctagctggggtgtggtggctcacacctataatcccagcactctgggaggccaaggcaggaggattgcttgagtccaggagttagagaccagcctgggcaacatagtgagactccgtctccacaaaaaataagcaaaattatctgcgtgtggtagcacacaccagaagtctcagctactcaggaggctgaggcgggagcattgcttaaacccagagttcaaggctataatgagccatgatggcacactgcactccagcctgggtgacagagtgagaccctgtctcaaaaaagaaaagaaaagaaataatataccctgagctcaggtacttgaagtttccctgacagtgggagtcatctgaagttagtaggaagaaggttccataggtagtagttgagcctcattgacaacaccagagttcccgttacccaaaaaaacaagtggagggggcacaggctatggcctgggatttttgtccttcccaactaaatattgtctgctaagcagctgatagcccccaggaacatgagctcactgagaaaaaaaaatagacaattgaggcatgcaaactaacagtcaaaaaatagacatgctggatataacacatacattggttgaaataaaatattcaatggatgtgagaaaatgcggaatggatacaaagaatgaactagcaacatcctttgcaagtagagaacaaaacaagtttcagtcaattctaagtggaaagaaatagtacgttataaccaaagattctctactctgtcaaatttttcatcaagtattaaaggcaacagacagatattctcaagcaggtaagacaacaaaaagtacagcatccatgaatacttctcaaacaacatcgaacattaaccaatcattccatgaactccagccaactataaattagtatcaaaaatgaagttctcagatttcttcgctcctgtgagtcacataaacataaaactaaaagtagagaactccaggaatggtagttaagactacaaatattatcaatcttgatagagtaaaataaagtgtacactgcttcattttaagttggaaggatgaaaacaagtatgtatgcttatttacccagtttttaaaattaaggagtgaataaatgctgtctacaaggaaaatgtgtagtttaaaaaatgagtccagacacaagcattgtaccttttttttttttttttttttttttgagaaggagtctcgctctgtcacccaggctggagtgcagtggtgctatctcagctcactgcaacctccgcctccagggttcaagtgattcttctgcctcagcctcccaagtactgggactatagatgcgcgcctccatgcgcagctaatttttgtatttttagtagagacggggtttcaccgtgttggccaagatggtctctatctcttgacttcgtgatccgccctcctcggcctcccaaagagctgggattacaggtgtgagccaccgtgcccagcctgcactttcttcttaactttagaggtaccatttaggaaaccatactccggcgacattggagcggttccgatgcccgcccggaagagagcgctctggcccaggcatcgcagctgcgggacagccgggagcggagcagggggcagccgcggaaaggaaaatgtgtttagaggtaaggaaaggaaatgctccaagggataaagagacatttataacttcaatcatttttaagttgacgttacctgtagtcagtgtttctaagaaacatacactgatagagagcgatcacccatatgacagaacattgctctttaatgctgccatttgggaaaagaaaggaggggaggagaggaatgtacacttttttgcttttattcgcaaacaatgtttggcagtttggggtcagagagagccatattctgtatttcttacacatttgatcctttgcagggcttgtataaatttttcatcattgaagaataaaactagcttaataaaaagaaaatgacaggtgaaaggtaaaaactgttcatatattttgctatgaagagaagcaaaaaaaaaaaaaaaaaaaaaaaaaggagtatgtctggatgctgatggtaaccatactttagagaaggacgggtgcaggttgggttcctgaggaaatgtacaggaagcatataaaccaatgcatacagcacctgcacctgtagaaggaaggaggaggaagcaggtgtgggcagggggagaaggtcagctgtggtggaacccaacaccctttgcccgcctcacaagaagctctggagattgaacagcccttcagagatgtctgaagttgggctgggaagagcaaacctttagcttctacatcagtcactggccgggggtcacctgcgaagcagcatacgtacccttcagcctagatgctttccgcaatcgtggagaggcggactgcaggaggctgtgctgacagcacgccagcagctggggcagcaagtccttcactgatgcagtgctggtggcccatcagtgtctgccacagggagatggctcagggatgaggagatggcaaaggctgagaagcgaaacactactggggttcactgtgctggaactagcctgcagcttcctccactataacaagggtggagtgccaactggtgtggaggtttggtggtggaagggatagatcatcccctgtcagcatctacatgctcaaagaaactttgagaaatgttatctcttgcaggagagaaggctaagaaatgtttgtctcagagactgggaaagcgggtcttctggggacacttaggagagttgcagggcacgtttatatgcttatagaagtgggaaaattaaaggaggacgagtcatctctatcacattttcctccatcaactcagtggctcaggctaggaaacttgaaggcagaattgtcctggaggatttccaatgctagaagcatcatgaaggaagagaggggctggaggtatttgtaggagaagaggacaaatggaggaccacagatggctggtggtactgaggctcagaaatgttgtacagcttgagcagattcggaaaagcaatgcagctctggtgtatcatatgccagggtcctggcatgacaccctccactaggtaaatagaggagcatgggacttacaaaggagctggaggagaagaggacacccaggaacggcgtagtgccttggctctggtaagtgggagctgtccttgccatcctaggcctgaagcgggaggagagcaatcataagagaaccaagggactgtcaggctgtgcggagaggacttccgaacaggggcctggacttccaggtgggggaagcagccagcccttcaggagccagccaggagacagcgtgcggaataggggcctctccctcagactccccatccttcgattccctgtccctttctctaggagacaagggaggctccggagcaggatgccgcgtggaagaatttggaatcagcgcacacccctactcctcatgacacaagtcatcaaaccaaccagggcgtcaaaatcttatttataagctaagagcatccatccttctgtagtttgcagagggctcctcatacatggcagcgcttcctgtgacaatcccagagggtccaactggaactggaaagtgcaccattcccaaggagcagtgggagctcgctctgggaagagtttcttccctctccgcggagccttccagccactcttacaaggaatttctcatccctgcagtcggcttggccagcagcagccgcggggctgcgccagtgcccgcctctggccaggggttcccgcgcctcgagcagcgccctgggcccttctacgggaagaggggatcgcggcgcccgcgacacccaggagctcggacgaccgcagcctcaccactaacccccaacaaaggtacagcgggagtccaggccgagataaagttcccttcccagtccgctggggagacaactggccgcggctgccctctgctccgctcccggctgtcccgcagctgcgaggccggggccagagcgctcccttccgggcgggcatcggagccgctgcggcgccgaccgcccttcgcgcccgggccgctggagaaggcggagcgagctcgcagctgctaacccccgaggggccgcctcgctggcgaggggagcgggaggaaggtccggattccggtggcaggaactggggctctgggccaccggttcaggctgccccaggaaatgcctgctttgcggtgccgcagagggtatagaggagctcggccccagagggtggctgttggggaggcggagctggccgcaggctggagcagctgcggagcctcccatcccgagcctagaatcggagaaatttcaggcggaaaatactgcggggatggtttggctcaagtctcccattctacagatgtgaaattttagagtgacccgactggggtcgcacagagggctgttggcagcaggacctgggggaagagcgagaggagagggcccccgtggcggccctgccctgtcctaaaggagaggggctgcctcccagatgagagccctgagaggccctagctgcgcaccctattcggtaataccaaataaaccaaccaaaataaaacataaaccttatagacgtgctgaaatacaattctctcctttctacatttccgaatacaaacattttgaatgagtttatcagaggtaaacctttccctcggttttagtggtggcagtttgctgatgcccagggtccaagcgtggggaaccccgcactgctgagcaaaggttaagggcagaagctcaaactgggttcacggttaatttggctaccagctctgtccaggtttgagcctcgggttctgcatctgcggaatgggaagacggttgggagagatggcctttgccaagggtggaccgagagcgaccgccgcgcgtgggaatttcacggcacagcctacgactctctagagcaatgggaggatcagctaggtgggcaaaagggccaaagcgtcagttcgccgcccaggtcgtcctctggcgccgcttcccagcccgcccaggcgctgtccaggccccagacgaccctccgaccttgtgccgggaaggccccgcggcgcggtgcgcaccgcgaactcccctgtggttctcaatagttggaattgaaaggacgccgggtgggtccggcccgagacttagctgtgggagctcagctctgcgctgcagtcagagcaatttccgacgcccacatctttacctctactccctccttccgttaatccacccccggaaaaaagaaacgccaaatgtattcagctgcctcaatttgtaattgctcacttattagactttactaatcctcaggacagggaccttttatattgggattgtcaaaatccttaaaacactgaaagactcacacccaggcaagcctgaagttagccacatgggagctacagttcgcccaacacacacctatacaacatgaattttccacctaaataacataaaatttgaagacactccctacggagacactattttctcctcacatttccaaatagagtcgggctagtgctcagaaatatatttgttctcatgttttagaagtttaaaataaatggattagattatcaaattaagagcgaataagtcacttcgaagaacaaacacaacgttccagtgagacacggaaagaaaagctagaaagaagttattgctgagaatataaaagcgggagggaaatcctctgtctaatttatttctccctcaacagttttgtaagaaaacgtcttgggctcaaagtagttgcaaagaagtctcccgtagcacagccggggcgcacgggtccggtgctggcagctgtgctatctgaatcctctctggccattaccgctgctcaggcacattttcaaaccaggggtgctaacgtcaatctggctttctgcgtttgcttccgacgaggggggaccggacccagggtggggctgcgtaaactcggggacacttgggaacatttactcaggaagtgagaggggccggctgctggtggctggtcctggacagagtggtcgagggaccagggctcaggtcggttccgctgcgcccgccgtcgccgacagtgaagtaagtacagtgcgggcggcggctcccggtgagtcacttcgtgagtgacactcagccccgggggtcgcgctggggtcggagccggaaggaatgttctgtccccggaaccgcttgcagccaggagttggaggccctctggccccgcagaggctgggttgcaggcatcgaaaacttcctgaacacgaccagtaagaatttgatctcgagcttccgaactccaaacgcctgggcaagaattcagcaaagcgcagcaccgctcacccgcacttcccccagctagcggttgctgtttcttggaagacgcgtttatccgccccagtcccgggtgggtgggtcattttgccaaagaaaatgtggttgggggtgacttcgagtagactttcactattaaataagtgcacctcagtgatggatttgttccaaattgatgtttgacttttaaaaaagcggtggtgaatgacaacacgaaacaatcagtgtcacaggttagcaaatcacactgtctcctaaattaaggcaaatgttggctttatatctattcaggaaaaagggggagatggaaagttttctcaaacctaacgtctccaacaaactcatatccagataaaacttcctacacatgactcccacgcacatgtttcgaccaggaaacttttgtttaccagactctcttcctggtaatttctcctgtctcttttcccctccccaacctactttcggcagtttggaaggctggagatttttgttaaggacactttacactaatctcagttaaccggcaggccaagctaacctggcaaagaataagaaggaaagacacacacacacacacacacacacacacacacacacacacacgacagcgatttccaaacatcctttctacttaaacttcctaatcccgtgcctgtcccagaagggtctccgaatgagtccccggcgtgggttggggggggggttccagtgcctagtgcatctcctaccctgctctccctcctccaaccgcctccctactctgcaacacgtaagcatcacgaaacctcctgcgaaacatctggatggggactggtgtcccaacatctgggcaactaccgccaaggctggcttctagggaacgagtgcggaaatgcgtgcgggtgtgggagcgcaccactcagtagggtaggacctctcccagcgctaggtcactgcagcattcttcccaccatctgctcctgtcaccagcccctaactccgcccctttgggcccgccccttgttccgaagccaatagcaacccctgaccgccctacaccgcccagaagcctttccacaccccctcgtcctgggagcgggttggctgctgagctctcggagaagcgcctgtatttgcatggcgttcggggtttttggtaggtagagcagcccgtcactctggaaggccgggaccgcccactccacctcggtccacagctctcttcctgcgcagttcgcctctgcagcctctgcggggaagtgccggggctgctcgaggctcagttcttaggactgcaaggaggcagccccggcgtgcggcggtgcgcacagtctagagtggccagggcgcgagagtgcaacgtcctcctggccccgagcgcgtcgtcgcgccccgggagcagaccctcgcccagcagttaccgccgtcccgactttccgttccagttgcagctcctgccgggcaacatgtcaagagccgccgccgctacagctgccgccgccacctggggaagagcagcagcagcagcggcggccgcgggcacacgggggcaataaaccgagccacccgggcgtccagcgtgccggggaaccctctctgcgctcactgcccggcgggacccacgccatgtgctgagccatgtccctggccgcgcccgcgggcagcgcatggggcagcgcctgagtggcggcagatcttgcctcgatgtccccggccggctcctaccgcagccgccgccgcccccgccgccggtgaggaggaagctcgcgctgctcttcgccatgctctgcgtctggctctatatgttcctgtactcgtgcgccggctcctgcgccgccgcgccggggctgctgctcctgggctctgggtcccgcgccgcacacgacccgccagccctggccacagctccggacgggacgccccccaggctgccgttccgggcgccgccagccaccccactggcttcaggcaaggagatggccgagggcgctgcgagcccggaggagcagagtcccgaggtgccggactccccaagccccatctccagctttttcagtgggtctgggagcaagcagctgccgcaggccatcatcatcggcgtgaagaagggcggcacgcgggcgctgctggagtttctgcgcgtgcaccccgacgtgcgcgccgtgggcgccgagccccatttcttcgatcgcagctacgacaagggcctcgcttggtaccggtgagtttccctgccaggggcagggtctccatcgtcgattcagaccctgagctaagggagacatggcgtatgatagggaattggcagggttacagcttcggaccacccggggtagggcagggaaactacggcagattgcgcagcgcatcctgtccgggtgcggtgagggttgcgctccgcttggttctcgtcacaacccacagaaagttctcgcggagcactggtgcccttgaattcatcaggcgacctcgccgcaaagaagaagggcagcgactgagaccgccctcagcaaagcgagccaccctctaaccatgggggtatccgactcgaatcgtattttatgactcgttttaaattttttcctcccggagcccgagacgctgggaatgttctgagcccctttggtcggtctccgccctcaaggaacttctagagcagcttctgcttcccagatggggagagggggtgggggccgcggcgtcccggcgaggccgcagagtctgttaactttttgttacagtccgcctggttaccggaaccccaagggtgtcagacccgcctcgctcgcgagccgcctgggctcgggagggtgagccgggcgggtggcccggcgcctccgcctggcgggcgggcggcgcgcggagcgtggagctgtgctggtccctgtcgggcaaaggcgcgcactgcaaccggctggagcggcgcgaggctttgaaggcgtccgggcctccgggcaccgccgcccgtttccgcctccctgccctcggtgctgggatagggaaagcaaggacgcgtgtctccgcggggcttttacacgtccggagcaaagaatattcggggcccattgattgagaaatgagggttgcttcgaggtcgcggcttccggaaattctgttctcgagtcgggttgcgggtcaggttccaaagggacagtggccccggggtcacaatcactacctctgcccactgctttccgcagctgctggtctttggggtgagctgttgggttgcccgagcttcgggtaaggcgcgagtgggcaggaggtctagatttcggcctccgataactgtcttcgactaggggcccaggtaacgacccccacattttcgttggggtctccacccgtaaccccagccagcacgacattcagacacccctccaggcccaattagcttcacagacgctcaagacttgggaaaacaaaagaggagaagataactgaacccctctccctgtgcccaccccactgtcgggacctgggtgggttggagaataaaagagggctgaccccgcggattaaaacggctcccttcccagcctcgtcctaccccttcccctttgtccttaatggttttttattattgtcaggagttgcccaagtctcgaggtttagccaaccgtgacagtcatctttcccaccgttcccgggctgtgacccattctcgggacactggtggataagaatggggtctctggagtccgacgcctggattcacgtcctggctagtcgcgtgaaccttggtgctctcatctgtgcagtgggaataatgcaggttctgggcagggatgggaagagtgaatgcgctggtacggtaaggtgcctcgcaggcacgtgagggcctctctaatcgttagctattgtcaccgattgtattgttatgacttctaccaccaccactccccctcctcctgggatggtgattccagggccaggcggcaggctataactagcgcccttccaggtggaacccgccagagccccgaggcagcctaggattttctgagatcagacacacttgggccgggttgggaggaactggcaggaaaaggactgaacccttaatgtcaggcggttttgaagcacctggggcaagctatggaaatccccacaggaaggctcacgcagtctcttaggcggctgccctccacctgccacgttctttttgattgactaaaaaacgctgaatgaagaacgaagtcgcgtggaaaccctcgccgcgcgcctgcagcggacagcgcagcccgggaggttcggctgccgacttgcgcccgggggctgcgctgcgagcggccacgcatggcggctggacccgggcggccgcaagggcttggctgggccgcgggaggcgggaggttcttcgtcctcccgagccatctccctgaactgacaagcaggactcccgggtccagggggcacagggcccggggcggtgacccggcggatcgggctgccggaggagcccactgtaaatgccgcaactggccccaaacactgcgttcctggactgcaccagcagctcctggcgcggccgcagagttggtggatattttccaagggggaaaaaaatcttttaaatgccatctgtttactttaaaaatgttgattacttaagaaaaacgaatggatgtctgggcaaaggtatggacgtcacaattattttgaaggcgtcctttttaactttaaacagaccacgccaggaggagactgctgacccagagcgcattacctaaaatctggtacccagagtgcacccttcgccctcgttggagttctctcctctctgccaagctttgctccgtgccagaggtgtgctccattgtacctccgctctgtccctgcagtcaggcaaccaattggagaagagtataaatagtaattaaccagggagagttgtaattcagaaacctagttaaaacaagtcctcaaaaactagagaatatgagagtggggagacattttgaaggcattaagaacaaaaaacgatggggacgaatggttgagtctgaggatcagcatcgtaatctgttagagaacgaggtcgtggctgtgtctgtgagtcgttaatgggtttaatcggttgatacacagcctgctagtggcctaaccagtaacccagggcctggcagatttgcatgacatctcggagtttgattgctcttccttccacttggcaaaaggagacaccatcagccggatcaggaggggtcatggtgagatggaacccaccgaggtggtgtacagagctggcgctgccaatggccagagtggcagcctttctacctccttaaccctgcaaaaatcaaacgtgctagtacgcactgtccatccacactggaactccagttggttttagtctgcgatgatgactcttctgggttgacttttccagttcattatgcagccctcttgaagcaggcctcccaaacttagcagacaccaatgagaacctcacaaagaggctcatcaagcaggctggtgaaactgggtgttacttcctgttccatgggtaccccatagtgtttgggaaacaccgggctgtggttcaggagaatttcacatatgctaagatggagaaagaacctgccctttacatttaggcttgggatgttaatttaaagtttgaatgaccaaaaattaaatctgtaacttttaaagtttctctttgtgattttacttaagtgttggtagatattcttaaattgtaatgacctcagtttgggaattaagttagccaaatattgtgtaattattgtttgttatacaaaaatatgccttagactgtacagcggcagaaactccctctaccacctcggtccccctttccattctgcgttatacaaaataagctgacacgttaatgctgtggcccacattaaacaaagtataccgtacgtgtgtgtgtgtgtatgtggcataataaatggtggtagctaacacttaccgaatgttttccctatgttccaggcactgtttcaagttttacaggattagcaaatttaatcctcattacagttctgtgaagtaggtacttttacaggtgaggaaacacaggcacagagaggttaagcaatttgcccaagatctcacagctgggaagtaccaaagctaatataccaacccaggcagtcctgctccagagatcgttctggaccattctggatcacacttcctcgcttaagtgattgaagcaagatatttatcatatagcatgggtccaaaactgagtttgctttagaagagtttgacagctttctgacatgcctttagtggtctcagcgcagactgcagattttgtcattcacttgaaaagaatatcagcccccaagcaggatagttactacatctaacattggttaataactagagtgaggataatcacaccaccgtgtcagtttcatttttctgcaaaggacagttagaatcaagggagtcactgacatggcaaaaaatccctcaagcatccagacagagaaaacatagcaagtgtccctcttgaggagatttatcctctgccatttgtcctttttaaggctgggaggaggatgtgaggttaaatgacacgttccagaacttcttggaattaatttattcataaaaagagtgcccccaaatcaagttcataattaacttgtactgattaaccagcagacaattatagctaacacttttggcagattcatttagaatgaacatagaaaaccctgtaacttcagaaatctctctcttgaaagctaatagctgaaaatagctatattccccacattttaaatttaacaaatgctgagaaaacaaaattgcctcctatttttctagtctacttcagaaaacctggtagcaaagaatgtttctgtcttcactgagggaaatttaagataagatctggctggggataatccattttgaaggaattacactctcttagtcccagagtttaaaccaagtatgtaactcacttccaagatgctgggtgaagataaaaaaaaaaaatctacatttgtatgcaacaatttgaaatacaaaccatcatgttacaaagctctcaagatttattagcaagacagtggagcatgtgttgaactctgtttttaattaggcacctaaattagaccataaaatggttgattaatcttttacaagttgaagggaaaatataacataaattaacctaatcataagtgttttcccagatgctctgagttaataaaatagtcaaaatttaatagcaacccatttgttttagataaatatgatgctaaaatatatgaattagattacacttattatcttccaaatgatatgttatcattgaacaggtctctaaaaattaggttgcagtacatgtcttaaaaatatttatcaaaatagaatactacaattaggaattacatgttggctaaactagattatgttttttaatggaaactgataattgaaaatttacaatttagcatagactagtatttgtgaaagatatttttccagctagagttgtattgcttgaaactttaaaatgacctgtcacagcttctgtgtttctagtttgatgttttagtctgaaaaaaaaaaaaaactttttaatattttgaaaagtcaatatgtcatataacgtcattccacatatgtatgctgatttatctttttgtttataatatgttgtaggaataaggttttctggttatatgaaatgactccttgaatcactaaaattatttataattaaaagcacaccaggaatttttttaaaaactcaccagtcagctagttttatgaatcagggaggtggcatttatttcaaggttcagaactgaaatacgtgactcaggctgcttgccgactggtttctatgtcagtagttttttgaatactttatgttctcactctatgaacatggaaattaagttgattgacagaaacacaaaatgcctactctaaaggcagggcataatgagcatttcttttgctgtgaatagagttagtttccaaacagggcgctacctctctcatttaacagtcgatgatttcagacagtaagagaaatttcaatcctaggctgttgggatagtcaggaattccagcaaaatgagtcccccaagtatgtggcatattttcaagtttaatgaaaacaatatgctgcctacctcgaatgaaaacatttaccatgactgaaaagaaaggagatactgatatctttgaaaactaattgtaagtagagcatgaaactttttatatatttaaaacattaccttgttggaactctcgggtttctctcaaactatgccaaaacaaaactaacatcaaataaaactgatgttcgtgcatgctgatttttatttctgatttttcttgtcaagagatttggggaaaagtttaagacgtgagaagcaattaccatcttaataaaatgataataaataatttttatggcagccaagaggctatgtgttaaaatactgctaatgctaataaaacccaccattaagtttatttgtacatagataaaagtggtattaatttcctttataaattcttttaaatacaaatttcacgcacatttcggtaacttgaaaaatattaaaaatatcttgttactggctcattcagaaaatgtacttcattgtgtcatggatgaaacatgtttaaatagcaaagttgtactgcacaggttttgcctcccaaagattgctgtttgtaaaaattatgagtgcgtatctttagatttagagctggttaaagagtactgtccgagaggagtttatattttccggacagtaaaaaaaagtacacacactatacattgttggaataagatatttttgttctaaatatggcaaatgtgaaaaaataagactctggtttaacatcaagttgattgtgtttcagcccagactctctcgccaaggggtcactattttaaacgccattgcccagaatgtgaacgattccatgtgtgtccatgaagcaccttacacgtaggattcagaatccctgttttctcccaagtctttgccccacactgcttaatactgttacacttgcttagaaacccataaaatgctgaaagatggttctgggcaatgtgaggtttgagaagcaaatggagagtgaaaaaaacattgggaagagcagtgagaatcccactcttgatttaatgaatggagctggggggagagccgcccccctttttcaggtctgcggacggaagtgtccagcagggccccagctgcccccgacgttgccacgtgtccgctcctttcgggagctaggggggcgttggcttggacatcccgttctggaagggtggccgggggcgctaccacgggcggggaaaatggctccgagccacccggcctcgggcatcaatcgacgcggccctggtgtcgcgcgggatcgccgcctctggcccgggggccgctgagccggagacagatggcggagcttcccagtgcgggggcagggctggcagccgagactggggccgcctcccccgcccctaggctggccgggtagtcctccgtggccacgtgaccagcctcgccgtccggcctcacctgttgggctgagcctggctgagcggcccgcgctagaggtgggcggtgccggcgggacccgtcttcgcgctgattgggtggaggggctgcggagagaccaatggtgttccgcctgagaggagaaccccgcccagagaggcgggctgagcgggcgcgccccgcccccgccggtgttggcctggctgttggcagctcagcttccactcggtgctgctgatttggtcctgagctgccttcgctttccaagtcgagcctatcagctgttctattgtgctctcttcctttggttcctctctctttgtcctgtctgcaccctcctgcacaaattctcctgttttctggagcggagatgtctgttctccgaatgttcggctcccgagtcctgcagggagaccgtctcgccttctgcagccctggctggcaggacccgagtgggcccgagtggattatttacagccgaagaggacacttcggctttttcggaccttattttgggtctgggaagcgggaggggttgctggcaagaaagtgaattcagttgagtcaatttgcaacgagcacgtttcgtttctcccttttctccgcccccgtttctctttggggggaagaaatggataatcctctttccacccacttctataatgggtgcctgtaaggcgattccgcagattcagtggataacagaaaataccttcatttccataatttggcccattaaatgacaggacgaagagaaagtgggaaggactgggatggagaggaggaagaggaaaaggccagtatctcacaagctccttccgatccctgaatctcacctggactcagaccgagtggcacgccccctccccagcaccttccgcgctgttcacacacgccaggctcgtcctcctaaccctaagtcctgtgcacagagccctgtagccgcccctacccagagcaggcactgacaagcccacccatttctagtgctgcccaaggtggactcagcccacaaaggccccagccccagcctttgcggataggtttcctccgtggtgccaacaactcttgtggatttgaaagaggcaacctttttcctcgcgtttctaaaggcctatgaaaagggcacgtcgggaagtgcacataagacgttgaacatcgttgcatgagatgttgaagaagtacaagatttcgttcttccttccattaaagtacaatctccctggggagagacacacaaagtacacaattagagaccagtaattctcttccagatcgctcccggtgccttttcctagctaagcagcctctccctgccggtcctggccttgtgtaccggaaactctcttggctggatccagcccttcctcctgatgtgctgtcgggcttgtccctggtgccctcttctctgattgttccagtctgcctgcgggcacttagcatatgctagtgctgccagttgacacagatacacaaagcagtaaacatcctgttcccaccgaagatccccaagtgtgtgggtggatgggtgtgggaagggatgaggtaaagagagaaaggcagtgaagtgatcattaccttatcactgatttaaaatacttattaatggaggaagccaaaggtgaccatttaaaatccttttctatagtcaatgaataatacattcgtataaatcatgtttacttactttttcattcatctaacaaggattttttttttttaagacagggtcttgctctgtcacctaggctggagtgcagtggcacaacctctacctcctgggctcaagcgatcctcccacctcagtctcccgtgtagcagggactacaggtgcacaccaccatgcctggctaattaaaaaaaaaaaaaaaaaaactgtagagatgagatctcactatgttaacccaggctggtctcaaactcctgggctcaagcaggtcgtcctcctcaacctcccaaagtgctggaattacaggtgtgagccaccacgccagacccagaccgtatttttagagccgttttaggttcacagcaaaatttaataaagtacacagatttcccaaatacccatcagtcctacacatgcacagtctgccactatcaccatcctctaccagactggcacatttgttacaactgatgaacctgtgttgacacgctatcactcagggtccgtaggtttacattagggctcactgttggtgatgtacattgtttagggttggacaaacgggtaatgacctgtatcccacattatagtatcattcagggtagttttaccacctcaaaaatcccgtcggtgcacttgctcttatcaagtacaaggcagcacttaaaacactgaggaagtacaggagccatgaacttgtccctgagaagcctgttttagttggtggcttgtatgcatacctgtaatcccaggtatgcatcaacttgtatgcatcgtttctctgcagggcctcctcttccttgaagcaccacttaaaacaggctcgaggagatctgtaggcaatttaagcctgatgtttttacttttatttttgaaatcattagtcctactaaattactagtaaatctgaaaaccatttaaggaggaagcagaagcatgagataagatagtacaaatttaaaatgtgatttttgcattttacttttccaggagctttccaaagagagctaaggaagtaagaaggggccagaaagtcagcaactgtgtgattaaaaaaaaaaatgtcttagcctccgtatgcaagaacttgctgtgtgcaggcgagtgggccaggcgcttacttaatcttaacagcgatgcttcctgtgtgatttcccttattttccaagggaggaaacggaaactcacagagattgcctaaggtcatacagctgtatctgtaggtggctctacctcttggacctaaggaagaagggaacgactccctgagggcccttcaaactccataacttggaggctgtctacctgcctgaaattcaatgccgtgttccttctggaccagttttaagccatctcttctgttgtttctttcctcccaaagatgtagacttttccacttaaaagcatttccaagattctattttttcatccttttttctgtccctattctctttcactccccacacttgttcctagcctgtctctgttgctctgatgtccatgttgatggtggcggtcttcaaccatgccatccgtgtgccaacccagcactttcctgccatccctgtagcccttgccccaacatctgtgcatttgactccccttctctgaccgaggcctgctcccatcccctcctctaccaactcatcccttctctcccacctgccctttgtgctgccccccacaactacaccactcagggtctcagctcttgggatcacattgacacacccccacattttacactctgtggcccattgcttctgagctgtattgtccagcaccatgaggaccccacccatggagacactgggttttgtaccatccccagcagttgtgagtgaaaatgtcttttttttttttttttttccagagacagagtcttgctctttcacccaggctggagtgcaatggaatgatctcggctcactgcaacctctgccacctgggttcaagcaattctcctgcctcagcctcccgagtagctgggattacagacgcccaccacaccacacccagctaattattgtgtgtgtgtgtgtggtgtgtgtgtgtgtgtatatatatatatatgtgtgtgtgtgtatatatatatttttagtagagacagggtttcaccatattggccaggctggtctcgaactcctgaccttgtgatccacccgccttggcctctcaaagtgctgggattacaggtgtgagccactgaacctggccaaaaatgtcttatataaagctgatctggcccaccccaactttatgcgctccactgagaacttggcccttacttactctgcagctgctagccctgctagtcaccaccccttacctgtgccaagatgacttgtatgcattgcttctctgcaggacctcctcttgctcgaagcaccacttaatttagctcttcctacacaaaaggagaaacctcagagagatggcagcctgtatatgaacaccactctcttaaccacttctcgacatggctttattttataccttccccaagacttccctccgtcatttcttttcttttttttgagacgaagtttcgctcttgttgcccaggctggaatgcagtggtgtgatctcagctcactgcaacctccgccttccaggttcaagtgattctcctgcctcagcctcccaagtagctgtgattacaggcatgcgccaccacacacggctaattttgtatttttagtagaggcggggttccaccatgttgctcaggctggtctcgaactcctgacctcagctgatccaccagccttggcctcacaaagtgctgggattacaggcgtgagccaccgcacctggccccctccatcatttctaaggaggtgctgtgttatctcttttcagtattatttgaaagaaatctcagacattatattgtttataaatctgtggggtttgggtttctttttttgtttttgtttttgttttgagatggagttttgctcttgttgcccaggctggagtgcagtggcacgatctcggctcaccgcaacctccgcctcccgggttcaagcgattctcctgcctcagcctcccgagtagctgggattacaggcatgcaccaccaggcccggctcattttgtattattagtagagacagggtttctccatgttggtcaggctggtcttgaactcctgacctcaggtgatccacccgcctcggcctcccgaaatgctgggattacaggcatgagccaccctgcctggcctgggtttcttatttaaatttttatttacatacttatagaaaagtgtacaaatcagaagtgcacagcctgacacttttcacaaggcaaacatacaagtatgttgttggtaacaagcgccaagatcaagaagtggcagttcaaaaacccccaaagctacctctgtatccccttctggttaccgtccccatcccgaggacaaccactatctcaccttctaccaccaccagttagttttgcctgttgttgaatctaatataaaggaagcctaacagtgaatattcatggggttttaaaacatgcacatttactgcctatgttgacaggttgggaggtttcacatacaaatccagatttcctgctgcttttataaaggatcagacagtaccatgcctgtctttcttatggcaacaaatggctggacctggtgagcccctgggcttgtgaatgggggaatcgtctctccttccgacattctgccctccctgccccttcctgtctcacactgggcagcttctctcatttgttaccagagtggggagcttcaaacagttttcccacttttttcaggtatgtacgtttcacgattaaatttccccaatccagttcatcacgggcattcttgttagagttgggcaggagcttttatctatttgactttttcattttacacttttgtagggatcccaagagaggctgtgtggaggtctgcttagctggctgccaattaaaatcagaaatcaccttgatgaaatcattttcagtgacatgcttctcctattttttacttttttagttccctaactggcttttctttgatcggattccccagttggcaaatcttagggtcagccttttgctgtggatagtcaggtcactcagtcattctggtgtcagcagaatacccaatgtgtaccatagaaattggacccagcagtgtttcctaaaccagttctcagccaactctcctgtaggaccacgttttcccccaatgcactgtggctcaatatgttgtcctattgcatgtgatgagcacacagagcatgccgtgtgcctcctgccatacaattagcaacacgcacactggctagtgagtttactgatcatggccttggatgctgtcgcaatgtcaaattacttataatagttttaagtgcttcctctcaggttttgcatgtatctcctccaggacagtttgtggggagtcctgcagaccacactttgagatgcgctattccacgtttctttgagtgaagacaaagttcttctgggtgtggtggctcatgcctgtaatcccagcactttgggaggccgaggtgggtggatcacctgaggtcaggagatcgagaccagcctgaccaacgtggtgaaaccctgtttctgctaaaaatacaaaaatgccaggcgtggtggcgggtgcctctaatcccagctactcaggaggctggagcaggagaatcacttgaacccaggaggcagaggttgtagtgagctgagattgcaccattgcactccagcctgggcaacaagagtgagactccatctcaaaaaaaaaaaaaattaataggtagagggtagaaaaaaagagttccatgttagcatattagaggccctgagaaatactgtagctaaaaacaaaacaaaacaaatttataaattaaagtaaataaatgtttgtttcacctagcatttcccccatgagtacagaaccctcctttcattcataccttccagcatcctgaggcattgtgtctatccagatgccagcttgggccatattcgccaaacatgtttctgaggtttcttgcagttctaagagtctgacactaatcctgtgctcccgctctctctccatccacctttaccccttggagcaggcttcccgttcctatagcttgagttattcctctcccacacatctcccactgtgatgtcatctcaaacctaatatgtctgcaccctccccctggccccagatgattgctgcaaaaagaataaagagcaagaagtggagttgcagtgaatcaaggaccctggataaaaagtggctgaggctgaggccgaggccgggggaacagacttgctgattaggatttcaagtcgggtcttgctttgcctccacttgctgttattctgtaagcaggctaattgcaggttcagctttcctccaagcagcttatgtctgttttcaaaggtaagtgttctgtgtcggtggtgtttatggagcaagatgtttgatggtgttggaaaaggtgaagcttttttccaccctgcctggccctgtgtggcgcttgtggtctgagtatgttttatgctagcaccgagatgattgctcaacctggttgtaatgttgaggtcttcactaaataacgtgagtgccacatgtaaacattggcagccttgagctgcaaacgaagccaataactttttaaaaaaatgcattttcccccttttgtgtggccaaggggaacactgaaaagtgtcctgcagttcacacagcaccggaaacaaaggaaactttcagattaggtgtcactggggaaggaggctagtgaagccttttaacagagagagatggggattgatttacctgtttgtataaaactaaagttacaggagtatctggatttctcctgcaagcactctaagcttgccatagttatcttattatctcctgatacacttaccgtaggttcttcgtacttggggaaattctaacatctgcatggatcgcctgctcacctctacctgagcccttgctcaggaggaggcgtttggcaaggacatttcacatggtttgtgggtgaatagtttcacaccagagtgggatcctctattgcatgtactcgactagcttttcattcttatcacacttcccttcctataaagttacgtatcttttaaagggaaatttaatacccaccttcgctttctgtgcggccttgtgaaaatcaggcaataacaaggacagccttattgccagtgtatgaccagagcatctagatggcactactagtggaatgtcatcttgtctaccattcattcattcattcatgattttctctaccagacagttttggaactcctagaatgggtcaggtggtaggcaggcattgggaaaacaaggttttaagccattgtccaaatcctcaaagaactcaccattttggtcgaggggccatggtgagaggtgtatagaacaaagtaagaaatgctgtaggagcagagagagagaaagaggcccagagaaaaagacaccatccagctgggcactgaagcacggataggagcttgctggctggttgtcctggaaactgatcagaatattcagggctgggaagctctgtgtgaaaaaggcccagagaagcacagaagagcactgcagcttgggcaaaacggtgaaacagtgagggtgcctgggattgggggagagaggagccaggaggctggctcagaggtggagaggctggaatggcacattaaagagagggcttttatcctacagacaagggagtttttcaggccagcagagctcctataccagagacattcacaagctttatatgagttgtgaattcaaattcttttcatgtattttcagggaaaatttaaaaatttgtgatttcaagacagagaaagcagaaaacacatagatggttttctaagatgaaccacatttagccctgctgggtgattcgagtaaggctcccaaaggaacaagcagcagttcccgatggtgtttgcaaatatggctgggacatgcttcctcatccccactcattgcccctgcggaatccacacaccccctccctgctgcctccttgggtagcttggatgactgtcctaagcaccttcgttctgtggtttgaagtactgagggaaagagagccattcttctccaactccccgctcggctccccaggccagcttctccagcccgatggtgtggagaggcaggtggtctgcaggctgggccctgccacctctcctctcccttcaccagtcctgctgagagaggatccctgtcattcttccgggagaggcatgtcagcaggcgcagcgggagaggggatgagggaattgccacgtgtccacggctctctggctcaaccaggcagggttggggcaaaccttcgccctctgtctcagaattgcaagcagtctaaagaagccatgcttggctcctgcttgccggtactcccagtgtgatttagtcctgggcccatcactcactgtggaggaactcagctaagtttgggaaccttccatgttagcatataaaagtaactgcagttattgataaggtctagctcagaattgggttgccctgatcagatcctgtttctgtttagaggagacagagaagagaggctgagaggtagactcaagagggcacagccaggaggcagctggttagggggctgccactgtggctgggtggctccctgccctgactgtgtctccttcccatctgtctcctccaagggaatgttcagtctttcactgttatttttgggatggtgttttcttccagtcccagctggaaacagaagtacagaacaagcccatgactattttgtgttctgcgaaaagagcatttgccaggcagcagatgtactggcttcctcaagactgaagctttcgttggttttgaggactttgatggaagccacctcattttacccagatggtgtcttttggggatgtgggtttgggggatgggaagtgcaaaagcacatcagtgagggctgtgagttgtttgtggttgatcagcctccagatgtggcagatggatggatcgtaagtcccagaagctcaggtgcggagagaggcactagcagacagcagcggtctgggctgcaggtaaaggtgcctcctaagtgattgcaagctcaagtatagtggtggacttagattctgtctcacacattccctccgtaaacagttttctagcagcttgtcaattacattctggtttggatttggtgctgttttgtctccattataaaatcctttggcttctctttactcaataagagtgtattgagaggacaggcaccgtgtaccctcctcccagaggaaattgtcattagggcagtccctgaggattgattatatccatttggaagccaacagtggacacagggaagagggggaggaatcaggttgattccagctagttcttggtttctctgtatctgaatgtccactgattttcgtttcgtttcttagaatttaagtactgacattaatgtattgagcatctactctgtatcaggctctgggattcaaagatttgttcatttcacaaatatcactgggtacctattttatgaacactgttcctgccctcctgtagcttacattctagtagggagatgggcagtaaagaaataaacaagtagattaataaaaatataatgtcaccaagagtgagggggtagacggttttgtgggagaggatgatgggagaaaagggacactataggctggaagtcaggagggcctttttttatttcaatagtttttggggaaaaggtggtgtttggctacatggataagttctttagtggtgatttctgagatttcgatgcacccatcacccaagcaatgtacactgtacccaatgtttagtctttgattcctcaccaccctccccccgagtccccaaagtccattatatcattcttaatgcttttgcgcaggagggcctttttaaaaagatgaaaaggtagaaagatgaggactgagagggtcagagaggcaggtcttgatgtgagacgccagcgtgtgtggggctttatgagtggaagggacaggacctgtcctacattttagaaaaaccctgactgctttgcagagacagactgtagagcatgagaataaagggaggggtgagatggctaaacacagtatggcatgatacatgcaaaaacagaagtagttcaaaaacaaatcctacagagggagaatttcaatctatctaggcgggatggggcgctgcactgggaaggcttcagggaggaggtgacatgggagtgaagttttgatggatgaataagagttcatgagcagaccaggtgggaaagaagatcatggcagaaggaatgcatgtgaaaaggcaaggaggttcctaggaaaaaatatggttggtgcagggaaggacccagcagaagagagtgaccgcatgaggggagtcgaggatgtttgtaagtaagccttaacctcatgacattgaagggtaactagtacaggttatcctgtgcttatttttttttctttttcaagtatgtcagctcaaaagtgggaattgtcagatgctgttgaatagtattgaacagaaattgcttttgctggtgatcagaaaagatgccactcagaaaaaagggccagtgctggagatcctctcaggttgtgttccaggttccacgtcttcgaatctggttgccttttgcctgtctggaaggagtctttcattaagttgaagccatgtaattagaaattccatttctcagctccgcagacctacaataggaacagccccattggccgctcagttccagcattcagttccaggctgccagtgccaaaatgccaaacctggtaattaagaggtggctctgcaggcacacacctgttccgagtgtgcaattagtgcctgccgcccttcttactgagctcagccctctgcaccgaccatttgcagggacggtgggatgtgtgtgtacaaccttgatttactgtgctttttctgaacatcaaagtaagaaagtctcactccttttgttgttgttcaaaagagaaagtgtaaaggaaggccagcttggagtgtctgaggatggagtttgggcaagcatttggtggtggacttttccccaggattgctcactcatcagacactttcccgtctacgttccgggtttatagctaggctaatttaatttccagctgagaggctactccccatatgatggtaatctcaaatagttaatgagctagaagaggaggcagcctattggattgattctggctcctcggctcagtggtttagcagtactaatttattagcctgtttgtctgctggttcgagaggcttgtttagcctggcgcagcttcatgtatctcccgtcttctaaagatggattgagcttgacttctggcctctgaacctttaggatcagctctcttttccatttacacacttcgtttatttaaagggaagaaggagggcagaggggatagccctgggtcggttcgtgagctcacgatacctgtaaagcacattgtgaaattccagttctttccagctgggtttgtatcaccagcagagccttttaggtgagctgccttgagcaaccctggcctgtaatattagttccaggatgtgggtaagtggtgtttttcttccatagaacactgatggcggttgaaaaaaaaatacaggctaaagtacataaaacagaataagaattgggaacgaggaatgagggctgtggtttggagaggctaatctagttattttcagttttgtgatcatttgtttcagtgggactgagtgaaaaatgaactcctaaaataaaggcattagtgcggaagtgcaaagaactagtaagagatttagcttccactttctaaattaatttttctctcatatatatatatacacacatcaccatcattatcatcatcattatcattatcatcatcatctcttttatatatatatatataaagtgctgtttatttcattataatttataggccctataattccaaaaaattaatttaaacccaaaccttttttttttaattgtcggataggaaaagaagacaaaaacctctttagaaagggggtgagtaattagagatgagtcagaggtgggatggttactatatttgagcattttgatctaggaggttcttagaaatgtagagaagtgggatgagcatgagactcagagtttcacattctggattttgagtccctgctttgttacattgcccagtatttgatctggggccacttaatctctcctctctcagcctcaccgtcccattctctaaaatgaaggaaacaacccttcattgttattacattgagccagtgagatcctgaacgtctagtcctttgtggcaggtaaagcgctctgcaactcttagagctgacatcatgatggccaaggcagggagaaccatcttctgataaaaggtttgcctctttccaaggggtaaacttatttttctgtagcatgaactttgagtattggactggtatctttgcgacttcacaaaactgtgccgactcatcatttcaatgcttaataaaatataaaggcagatcccatgtgtatgtattgcaggcagagtgtttgggtgggcctaagtgttatgctaacctcccagatggccgaaatctagaaaacctggaagagtccatgtcctctctcccccattcactgacccctaacacagatcatgtcaaccaggcttttgaccagcagaacaaccaacccgtggctggtggacagctgctgggctgtgccaaggctcttaatctgggcccacagttgctctggagtctgtgaatctcctgaagttgagaagcgagatttgtgtctatgtcttttttttttttttttttttttgttgagacagagtctcaccctgtaacccagactggagtgcaatggcgcaatttcggctcactgcaacctctgcctcctgggttcaagcgattctcctgcctcagcctcctgagtagttggaattacaggcacatgccaccatgcccggctaatttttttgtatcttttgtagagacggggtttcaccatgttggccaggctggtctcgaactcctaacctggtgatccacctgccttggcctcccaaagtgttgggattacaggcgtgagccaccgcacctggccgtgtatatgtcttatatctgcattttgctgcaaagagggtccatccctttactcggattctccacaactcataaaagctccagagctctgctccttgggtactgcactggggaatttgcatacctttttgtagtcagcaagggtagcattctgtcgtaatatttaacaaggcctatttctattctgaacaagtgaagaatcatgtatcttcagaggaaggaggagcccaggaaaggggatcctttttaaaagctgtgagaaagctgtgaatcaggtccatagtcatttggggtacatttcttaggacaattcctgggtccatcttatatccccacttttggtttgcttctttaaccgtcatgttttatgtgcttttttttttgtctcataaagaaagctatctcaattccagatgcattgagataacttcatattgggtgtgaggaggctgataactacaccagctttatagctttgtggtcagttgattccattcctcagtttgttacctgatagtcctgactgtctccaagtgacaagtgaatcgatgtgcatttagcaaacccaggaaaacattgtctttggagaggtttgagcttgattaatctccaaaacgtgctaatggggcaatagagagctcagctcttgttctctccttcaggtggtgtttgcctgtgagcttagtgccctatgttcccagcccagggaattggaaattgattcatttgggaaagtaacagcttaaaggtctttatttgattttgtcagagaatagagaacaccgctgagcttttcagagagaggcagtaattattcttggtgcacccccgacccctgcccccaaccccaacctaggctgattcgtctgcccagaatgagcctttctggacccaggagcccttttctcgcttataatctggggttattcttaccttctctcagttttgatctgtttttacacatggagacaggacgtaaatcttcatttgtttataacatttcttggatgaacacctaaattcttcctcacccctcaccctcaaaacttcctgggttactgctacttctgtgggtgaacacagagtgcttcagtgtcatgccctccatcaactttgcttaaaaattgagggtgctccttgtccccacttctttctccacatctaacctgtcagtggcttttctttctatcttcctttaaaacgtttgtttgtttatttatttatttttagagataagggtcttgccatgtggcccaggctggtctcgaactcctggccccaagtaatcctccagccttagcttcctgagtagcaaaatgtttagaattagctgccccttcttttacatccccactgtcccctccccattcaaatctacatatttcgtttatttttatctatcgtttgttttttaaaaatatattttagagacagggtcttgctctgttgcccaggctagagcacaatggtgtgatcatagctcactgcagcctccacctcctgggctcaagtgatcctcccgcttcagcctcctgagtagctgggactacaggcacaccatcacacctggctaatttttaaaaatttttgtagagatagggtctccactgtgttatccaggttggtcttaagctcttgggctcaagcaatcctcccatcttggccttccaaggtgccagaatcataggtgtgagccaccattaaggcgattcttaaaaatgatacataaagcacagagagcacataaaacatgacagttaaagaagaaaaccaaaagtgggaatataaggtggacccaggaattgtcctaagaaatgtaccccaaatgactatggacctgatccacagctttctcacagcttttaaaaaaagaaaaccttaattacacaaatcacaaaaacaagctgtttgctgaaagggaaccatgactgttcttggtattaagccgaggggctggcataaagagattgccatggggcaatggctactggcacagatagggcccctccaagaagcacatggttaatccagcctttttgttaaaggatatttttcttagaaaaaggtaaaatcatgctctcatcaaggtatacaatgagtgtgttaaaaaccttatttcgctcattattaatgatggaaccaggcaaatgttaccattggttcaaaggagaagtcaaaagaatacaaatttacttggactttaattaacaaatagatgagaaactgacttcttccactgagtaggaggtagagaaaaaagtccagagaactcccaccagaaagaacttatttgtatatctctggtcaagaatcaagaattatattggattgctatattgctgtctatataatttagaaagttgcagagtctctcaaaagcaataaaaggctggagtcagataatcagcgagcgtgctctaaacagtgcaagttttccactggagacacctagtgatctttttttgcttattccaaatttctttacattttaaaaatactggtcttagtaggctcgcggagtttataatcagctcaaagcctaagcctgtttaagatacgctgctggtaagtgctggctccctgacgcctaacaaaagattttgatgccgccaacctcctacattttatgtggcttctcattgcctcagaggtcaaatccaaaatctgtcttagcatttgttcctgcatttgtttactcttcctttatctagcaactgtttatttttgccacagtgcaaataagccagtcctcacccccttggaggactgctatagtagatggatagaggttatgatgactctgtgtgtgtgtgtgtacgtgtgtgtgtgtgcacgcacgtgtgtgcgtgtgtgtgtgcattttcaggaaggatgttgggaatgtaatagttatgaaaaaggaacaaggagtgtatagaaatatattagaagaaggaggtccagaaagaatagtccaggaggagggaagtccatgggggccaagaaacctcatgatccactggagaaaccacaggtgcttcctgatagctggggtgaagcagagttggaaggagggttggaaagagcgagggaggaacttagaattcccttggagtgaattcatatatgccctgccagggagtttgcaggtcattctcaacacaacgagaagctatgaacatttccagatttggcttttggaaagatgtctgtggaagcaagggatggagggatggacagagtggatgagggtattcccagcctgttttccaatccatttttctaaccttatttgccatcatgtcttaaaaacaaatacaaaaacaaaaaacaaaaacttcagtccaggctaagtggcccaatggctgtctcattgagtaggctttgttcatgttcctaaataggagcatcttttgttcctgatttcttcacttccacctactcttggggcaggctcaggggccgtggctcacgcctgtaatcccagcagtttgggaggccgaggcgggtggatcacttgaggtcaggggtttgagaccagcctggccaacatgatgaaaccccatctctactacaaatacaaaaaaactagctggacgtggtggtgtgcacctgtaaccccagctacttgggaggctgaggcaggagactcgcttgaacccgggaggtggaggttgcagtgagcagagatcgtgccactgcactccagcctgggcaacaagagtgaaactctgtctcaaaaaaaaaaaaaaaaaaaaaaaaagaagaagaagaagaagcttcagttgtcccgagcacaacttctgggtgccaatttttcacgtttctcattttcgagtcaagtgtataatatctcttgactgtgtctggaatttctctcaacataaacggtaagtccctggagggcaagaatcatcccgatcaacaacacacactggccatatcactgactccttcatcattatgacaaatattaaagttgaattcgagtttcctttcctcttgctgctacctaggaggcatttgccatcacttgagggatgcttgggaatgcaaactaactttaataataattaaggcaaaataataagtaataattaacacaaatctgctaattagtgcaatttttctcattgttattaactgtaaccatttattagtctgaacagatgttgattactggccaccagaggtaaagcatcccaagttcaatggggggagatgggctcagagtttgctgtgatccacaggtaaaataaggaactctgatcttatcacatttgttgtgtgtttttgcttagcatttaagttcaagacttttatgggtatagccacttaatgtcattgcgtcacttaatgtaatgggtgtgatgatacatgtatgtgtcatctttggacatctttggacatcaggatactgggaccatcacccttttgaatcctggccccacctgtttattattccaagttgcccttgattcacccctgagtttcttgacatatttgcatcatgacctccagtcattagctttaagccttgctagttgattcattttctttcattcatttatttgttcattcaacaaatattttcaagtgcttgcgatgcctggtgttttgctgtttttcttgtatttttttaaagatagtctttaaaactcacagtctaaacaaatacgagacaaaacatggaaggcaataagctgcaattaaagattttgtttttggaaatggtcattaggcttaaaaatagtcacagggtcagtttttcacgaagccaatgcagggtaaaaggctaatctcacttgtaattcttagcagctctctcactgatggtttagttacttaatctccttggtgtttactgtgtcgttccttacgggtgaagaatgggagatgaacgggaatgctttgtctaaagcacagaagagttgctggaaattttaagactcaccagtcaggcaacatcatctatcaaaaagttctcatagaatgtaacaaataatcatggaacctactcaaataatgcagaacctttgtccatagcttcaggcctccaatgctttccttctctctttggatgtgaaatgcacaaggcaggttggactctgtatactgatctgttgcaaaggtatcgggcttttagaataaatggttgaccatgacaatgaaaagatgagaatgtagggaggttgggcttacttttctcctgctgaaagttgattccgggtagcatctgaacttcacaagctgagaattccaataaatccacaaaaagaattcccctagggaagggggtgtggactttaattgatgatgtccaattagagtttccattgacattgccatgtctcttgttttcttgagacatctcttggtcaccctcaagcatatgtacaagccagttaggaagaagtaagtactgatgacaagaaggagtgtgagatgagaaacagtagccttttctttgtctgtagcatctcaagttttatagtctctgggatcttctctctgattagaaagtgcttcttttccacctggcaaggtggcacacacctgtaatcccaacactttgagaggctgtgctgggtggattgcttgggcccagaagtttaagaccagcctgggaaacatggcaaaaccctgtctctacaaaataaaataaaataatgcaaaaaaagagagagcaactgcttcattgcttttctaaaacgttgttgagctatttaaagcctatgataacgggggtttatttgcacttacttcccttcattttagttgaattcaagcttatgtcttcagatttttattgacttagttaccttatactgtttttagtggattgccgtgaagtagggttctgttggttgagcacaagggaagcagagagctggatggagccattatctcagacttaagtcaagcgctgattgaaatttctcttgtcccaaactcctagtggtcctgcactcaggagatagggaaggtcgctgacgatactgagtcttttccacagtgcttgcttctttttagcagcctcagatggatccctgcccctaaactggggctgtttctctccttctcaacctaattgtgtgccatgaggaaataaagaaagaaagagagaaagagagaaagaaagaaagaaagaaagaaagaaagaaagaaagaaagaaagaaagaaaaggaaggaaggaaggaaggaaggagaggaaggaaggaaaagagagaaagagagagaggaaggaaggaaggaaaggaagggagggagggagagagagagaaagaaagaaaaagaaagaagaaaagaaagaaggaaagagagaaggagaaagaagaaagaaaaagaaaggaaaagaagaaagaaaaggaaagaaaagaagaaaagaaaagaaaagaaagagcttgtgttaaaagctgcctaatttcccattcctccttggctgatcatctaattcattcagtgatgtcaaccccagaaggagactcagtttttctttgtctccaacatcctacaggggcactaagaaggagggcaccaaaaatggaatgcttcatagcacaagggaaaaattacaagaaatccaaactcttttaaatatttgttgttacttgaacctttaaatttaaaaaacgattttatgtctcttcttccttaacagcatttctctcatccagagccaaatgccaacggagacataaagagggggcacaagtgggattcatcccaccttacccttaggtaggaatttgctgctttcagagtgtattcatctacaaactacactggattcttggaagaatttttttgtaaaagtggcaggacaaatgttatccttttacagatgaggaaagatggcacagagacgttgtgcacttgcctgaggccacacagcctgaccttgaactccacttttcttttgattcaccaggctgagtgcctcattttaaggtacatttgacattgagcatcatctgatgacacctcctgggggtggtctgtaccaatgcccttggggtgcgttttgtacgtattcaaacaccaaatatttatagaggttctacttaatgtctgccagcttgtgccaccctactgctggctgtaggaggaagtggtatgtggggaggggtgggagaaagggtggttataataactttagagctgaggaacacccttttaaaccaatccattaatttttacacgcggagaactgagcacaagcttttgagtgtcttgtccaagtacctgttgtctgtggcagggcaggaactggaacctagagtttcatatgcccagtgcccactctgctttcattctgagcattgggcagcccctccccttgtcctgtttctctcctggtttcccggtgtgtgtgtgtgtgtgtgtgtgtgtgtgtgtgttgcttgcgggtggaggtttagtgattttcatcaactctgtgttgactggtgttgcagagtgttttgcaagctctctgggtgaaggccagtttacaaacatttacactgtgctaccaagggtacaagggaaggctgcttttcttgggaatgaagctgggagcagggaggggactacagaggcatgcgaaaaagaaaagagaattgcaagctgcttgctggaggaatggccctttgttgccagggaagtaacccacatagggctggagccccaccgacccagaaaaaagaacggtgttagagaccgggaagctaggactcatcagagacaaaacgttggcccagcgtgtgcagagaagaatctgtccaagcaggaaagagcagaactacttcaactgcagctggattttggtaccctcctccccttctttctgggtactcagctctgtcccgcccctgcccattggcagcactgattttactttctaaaaagtccgcttcccagaaaactcttgttctttctttataatgattttatttttaagttggattttgttttgcttttttttccccctaggaaataggacacaggatcattgatttcacaggatttgtcccggcataaacaggagtttgtaaggtcctgtaaacaggagcagtaccccagagagctcacccgcaaaagactattagcttttaattgaaaccctccctccacccccacccccagccccttccaggaacaggaacaggtggccattgtgaagcggggcctataaccgaggattctgccccaatgaaagggatcttgagttgacccagagaagcgagatgctcttttgagctccacccccttatggtattcaagggcttttcattttctgagcagtattgaaattctaggacaatggaggccaaatccttgtggtgggggttgggggctgggcgtggagaaaggagagagggcctggaagaggaggagggctcgggagtccatcccttgttatttttcttctttcctacccattacctttaaaacatttaaaaaaggaaagagaaaggcctagtaaacttttaatgaataatgacatcacttccgggagccccacggatcctgctgcgaaacctgaaattgagagccagtaactatttacaatttcagttcaaattattctaaaccctcccaaaggagttctttgatatgcaaacatctcccccaaatggagataattatttatggagatgtgggcctttgaagggagttctcagaaagggtggctttgaggcttcctaggaaaggaaggaggttccagataaggagtggcagggctgatacacatcttctgcccagcctcctcccgccaaaccccactccctgggatgaaagctgctttaaagaagaaacttcccggagttacaacttgcagttcaaattacagctctcctctgtcattgtccccatgtctatgttaagttttctgggaaaacttccttttcgcatccctggctgggtgtcttatctttcagtagatgaagaaaggggagaggagagactgtaacctttgtctttttgacccctgaggttccctgggatgtataaggtcatgtagaaagagcccaggctgtttttggggggtgaatacttaaggttagtacattggctttcggagaagacagtagtttaggccatgcttgctattacagaaaatgctgtgattaggactgtaatgaccttgcggcctactctttctttttcccttggattttcttttgaaaatgctttaacacgttggtctgaagtaccagatgccctccccccataacctgccagcgtcttccacctctaggacttgcctggcagcttggaagtttgcttcttggaagcatcctctaccctcccccattcgcagctaacctaaaagtctgcaaccgctcccaccgcccgttcaagctggtcacctgagtaggtggaatggaaatctttcctggaatggaaagattgagcaactggtccacggaatgcggagactgaaataagccctcagcttccatcccaccggttcttgggtccctcatttcccttattatcgcacttccttccccaaggaacagagcaggagctaaggatccagctccaagcagctgaggccaaggagcggcttgggcaaccccattcagcacggtgagggtacagagcagagtccctgataactgatgggcatcctttcataaaagaggaccttttatctttttttttttttttttttttttttaatgtcgtaggttaagacgtgctaactgacaaatctcagttgtaaaactgagaagggtttttctttttcctgagtgcttggcggtggttgctaggggtttcgagaccagcaaagctgcgcatgctccctgctccccaggaagagcccgcagctccaagaaaccaggtgatgagaataatacccatgatgttggtcttggttaaggagtgagaccctgtgcgtccccagaggagaaaatgattgttctcgtaggaaagaaactaaagagagatgggatctgtgaaagaaaaccagagccatagtagtcaaagcggtataaaaacagattttaggccgggcacggtggctcatgcctgtaatcccagcactttgagaggccgaggcgggcggatcacgaggtcaggagtttgagacccgcctggccaatatggtgaaaccccgtctccactaacaatacaaaaaattagccgagcatggtggcaggcgcctgtagtctcagctactcgggaggctgaggcaggagaatcgcttgaacccggggaggcacaggtggcagtgagctgacatggcaccactgcactccagcctgggtgaccgagtgagactccgactcaaaaaaaaaacaacaaaaaaaaacagattttgttcaacaactattgcaacaaaggaaaagagacctcagaactggcctcagttcttaatacagcatagacaagtggggatttatagccaaggtgctgtgggtgagggggcggggtagggtgttgggaggagtaggggatgtcttcgggcagggggtgagaggttatcagtggttggaaaattactaagaggaatcatcaggggtcgggggattctggctaaacccacctagccagattcttactgaagacaggccagggtgacccaacatcacctgggggatagtagaggctgagaaccttttttttctgagacagagtctcgcaatggtgtgatcttggctcaccgcaacctctcccgggttcaagcgattctcctgcctcagcctccccagtagctgggattacaggcatgtgccaccacgaccagctaacgtttctattttcagtagaggggtttcttcatgttggtcaggctggtcttgaactcctaacctcaaggtgatccacccgcctcagcctcccaaagtgttgggattacaggcgtgagccaccgcgcccggccaaggctgagaacctttaaatatcgatggtgatcagctatggaggatggggtattctagctaaaccaactcaggagaattattgctaaaatgggacattgcagaggcaaagagaatgacaaaagttgaggcgtagttgaaaagtttgggggagcctgagtcgtttgattgggagaagaatctttgctagattccagtgttttttcatggtttttttttttttaaattgactttatttttaagagcatttataggttcacagcaagattgaagggaaggtacagatatttatttatttattgagatatggtctcactatgtggcttaggctgtagtgcagtgaatgttcagaggagcaattatagccagtacagcctcaaattcctgggcttaagcaatcctctttcctcagggcctctgaggaactgagattacaggcgtgccagcacaccaggctcatcagggatttcttatatactcctactcaacccctacatgcataaactcccccattatcaatatttcctaccaaagtgatacaatagatgagcgtacattgacatctcattatcacccaaagttcatagtttacactggggttcactggtggtgttgcataatctatgggtttggacatacgtataatgacatggaagctacatgatattttcctacagggtagtttcactgccctaaaatattctgtgaatcatctctttatgcccctcacccaacccccaggatcccagtgttttctttttgagtttagctgctgatgtttgtcggtttatcaggcactcaaaaaactgcactctctattccctttgctctttttaagggggcatccttatttcctagacagatttgtgactgtgtagatgctgggaacatgttttgctttggagtggggaggggggaaatcttgtaaagatttctctttgtcacatttttgatttgtgaattctcagaggctggacctgggcttcctggaaggtaatgcagatgtgacgtcacaatttcctgtcccgtgctcttgggattggtgtgagaatagtttatcagaatgggctgaccttctgcagattccactgctgaactaattttatagatgaggaagctgaggcccagaaaggcccagaaaagctgaagctcttgggattggtgtgagaacagtttatcagaatgggcaaaacctctggagactccactgctgagctaattttacagatgaggaagctgaagcccagaaaagtaaccactgggacatgccgattaggagcagatatcttcaaaaaaataacttgtctttaaagaaaaaaaagcaacagtaaatatatcagttatatgaaaatttggccagatgcggtggctcatgcctgtaatcccaacactttgggaggccaaggagggtggatcagttgaggtcaggagttcgacaccagcctgtccaacatgatgaaactccatctctactaaaaatacaaaaattagctgggcatggtggcgacacctgtaatctcagctactctggaagctgaggcaggagaattgcttgaaccgaggaggcggaggttgcagagagccgagatcgcaccactgcactccagccagggcaacagagcaagactctgtctcaaaaaaaaaaaaggaaaaaaaatttctatgtctctattgatgattctttcatgtcaatcaatattttccccaaagcagtgtcaaaacaaggatttgggcaacctttggccctttcaaagggaacttgtaaaatcttcattggaagaggctgaataagtggatttgggggaatgctagaattgttctctatcttgatgatagtggtggttacacaattctatgcatttgtcaaaattcttggaactggacaccaagaatgatttttactatatctaagttaaacagtaagtttaaaaaacgagaaagagtctttgttggagttcagaaaacgtggggtatttctgcaactaaacaaggaagtcattttcctaacgggccaggagaagtgggtggggtgaatgtttcccttgctcttcccagttttcctcaattgacttggaagactgggcctaccccaactcaatgtgggctgcagcttgctctcctctctaaagcacattaacttccatcatctgttttacgtaaatttccaggcatctgtttgcctgttgtgagttaggttacgcccatttcaataatcttttttattgttgtgtaatttaccagttcaaacagtaacttcaattgctgggctataggaggagggatatcacccgaggaaaggaagaagcagaagaagatattagggcaacatttggtactgggtaacatcagaattatagggctttttagaactgctctggttcattttaatttcctacgcctttagccttcaaggttggtttttaatagtccacttctagctgcagtatttaagagccccagcaagagtggggatgttcagtggtaaagtctcgtgtttctccaaagccctgggaccgccattccccagtgggaaactgacttggcaggaagtcagctcatcttctcagctgaccactctattctggagaggaaaggcaaggggcagaggctatctccgactgcagatgaaaattctaaatcttcaaatgtgattctgagcatcctgcctcaatattgggaaaaaggaaaacaggaatttatgccattaattcatcttactttcatggaatttttttcttttaaatgagaacttagtgtctttctttccttttccttccttccatcctttctttctttcatttataaagaaaggagtttatttcttacagttctggaggctgacaagaccaagattttggggacacatctggtgagggccttcttgctggtggggactctgttgagtcctgaggctgcttaaggcatccgatggcgagaggctgagtgcattcatatgctctaaaagagcactgagattcatttgcagccacaaactcttatacaagcataaattagacaatctaatactagtattattctttacctgtctgtttttcttctgcttagggtaatattatttaacttttgatgatgaaagaattagatacctctgttagcttttctttatcacaccagtagaggtggacttatctttcttctagtttcctttcatttgttttgttttactggtagcctgattcatatctggtaaccaactctcagaggggtgtgtgtgtgtgtgtttaggggcaacaagtatcttatcctgattggatttttttttttttgagatggagtctctctccgttgcccaggctggagtgcagtgtcaggatctcggctcactgcaacctccatctcccaggttcaagtgactctcctgcctcagcctcctgaatagctggaattacaggagcccgccatcatgcctggctaatttttttttttttttgtatttttagtagagactgggtttcgtcatgttggccaggctggtcttgaactcctggcctcaggtaatctgcccacctcagcctccaaagtgctgggattacaggtgtgagccattgcacctgacctgcctgattggaatggatttgttcttttctctgcagtttgtagaccatcaggacacaagccctcactggccctgggaggtgatctacaggcagctgagcgtgtgaccttcactcctctagccatgactcaaatagctagtcttggattagctgaacaactttcagttctgctgacaatgttgtcttctcattttttccccccacgaaggtggacctctatacccacatagtatctccacttaggtgcacatgaatatcagcagaatacatgactagattatgacaagttccaggcccacagatgccacagcataatggtttccagtcctgcttgcacattagaatcatctaaaagaatcccatgttgaagccccacccatccagggcctgattcaatgggtgtggggaggggccaggcatataacgccagttaaaagcaccctgcatgatttaaaatgcttccagggatggaactgagtgccacagaggtggcgtataccatttgttttagacggagtcttgttctgtcaccaggctggagtgcagtggtgcaatctcagctcactgcaacctccacctctcaggttcaagtgattctcctgcctcagcctccggagtgactgggactacaggtgcgtgccgccacgcccggctaattttttgtattttagtagagatggggtttcatcatgttagccaggacggtctcgatctcctgaccttgtgatctgcccaccttggcctcccaaagtgctaggattacagatgtgagccaacacgcccagcccatatacctttctttgttttggtttgtttgttttttgagatgcagttttgctcttgttgcccaggctggagtgcaatggcaccatctcggctcactgcaacctctgcgtcccaggttcaagtgattctcctgcctcagcctcccaagtagctgagattacaggtgtgtgccactgcgcctggctaatttttgtatttttagtagagattaggtttttacatgttggccaggctggtctcgaactcctgacctcaggtgatccagctgccttagcctcccataatgctgggattacaggtgtgagccagcacacccagcctggcttatacctttcttgaaatatccttaaacaaattgaaagcctgaaatactccaaatcctcctggttctcagaatcatgcactgtggcccagttttttgaggccactggtggtcctggaagttcattgtgcttgtcatccccaaatcttaatggggtgacaagcctgccttgcccttaggtttaattaaagaagtaggatctttcttgggttctgtcaccctgtgttcatgtgggcacacatacctggttagtatctcctaggcttgtcccaaggaatactcttgtgggctgtgagcattgtgtcttccttagctttggactggagatgctgtctagccccatcagcctcacaaacatctattagtgatatgtgccaggtttacgtgcttttcaaaaaggtatcccttcctgcccacgtggtaaagaggggaagaagaggcggggccagggttgctggaggggaggtgctgttgcaatgattggtgattttccaggcctcatagaaggcagttaacaatgggatcatgtaaaccaaagagccttattgtttcgaaattggacgcctatttgaacaattatgatcggcagtgatctgattaacactgaaatacctattaggctactaatgtatgaatgaaagaaaaaaatacaggaatctatttaaagagaggacaggtgtgtagctctacatgttctaaatcatattaagaagaagcaaaggagggttaagagaggatcatcatgaatggaagaaggcccatcaggagagctgactacaagtcccaactctctgacctgcagctggtgacccatctccaagcaagtcaccctctctcctttagactcagtgtcttcatttgaattggagattacaataactaccacaaaggcgttaaagtaggtgataaagcaggtgaaagtttgcaagctccagggcgctatataattatgagctctgactatccctttgagaaactggttttcataatgagtgactcaattaacctgcatcatgtgctcactctggaggccagcctggggctggacaggctgctgaggttgctgggatgggcacacagattccatgtgagggggtcttaccctcggccacatcctcatcctttcttctgtgtgccactgttgagatcagagaggtttctgagagtgagggcaggaaagtgtgcccagaggaggggcagaggaagaggaaggtgtgcccagttagtgaatggaaagaacttgactccaggactgcgcggttgtagggtgagggtggcagaagaagagcagccaaaggggcaaagagggacttgcctggatgattctgtgccaggagccgctcacacacttctcaggcctgccatgcttctcacttggggtcacaaaggttctttgcttgaccaaacttcagtccgcctcctgaaccttctcccaggacctcctgtgcacttccttgtaaaacccaatcttagcaaaggcccctgataagtcattttggcatgaactcctcacccttgatatcttatcaggttcctcagcctccaccagcccccaggtgatgtctggtcactttggccagtcttcagggagagtcctattagatcggtttagccagaattccccttacccctcatggcgcctcgtagtaagtttctatccactgacccccaccctgctccttggctctaaaccccacttgcccatgctgtattccgagttgaggccaatctgtctccccatcactgcaagactccactgcagtgggtctctatacctatcatgatggtcctgaataaagtctttgctgctgtgatttaacaagcgtgattaattactcttttcttttttttcttttgagacagagtctcactctgttgcccaggatggagtgcagtggcgcgatctcagctcactgcaacctccgcctcccaggttcaagagattctcctgtctcagcctcccgagtagccaggattacaggcatgtgccaccacgctcagctaatttttgtatttttaggagagacgaggtttcaccatgttggccaggctggtcttgaactcctgacctcaagtgaaccacccacctcagcctcctaaagtgctgggattccaggcgtgagccaccaagcccggctgagtaatttttttcttggcatcttgggagatgccaagtctctttatcacagcagtagttcccctggctcagttattttgacaataatcaaaataaattctgaggctccttgagtgctttctgacacatgtggacaaacaccagactgtcctggggagaggggccctcatatgggttgtgggaccagcaggcggtcgagcacagtaaatctgcccacggctcagggaatctttatttatggttgatctctcatttcctttttactagctttattatgtggtttcctatacacaattgccgatttagcattctgttcagctactgacaagcccttctctagggccagtgaggaaattccggctgcagagttcagggaaggttgtggaccccaggcaggctgagagcagaatccagcattcctgcacttagcctcttccaggagccaaacctccctcattgcccccctgtggggtagaactgaatgagtgacaagtcccctgtgcacaagtcttgcttccttacatcctttccaagatcctgtcaacagaagataattgataacatttttgtaacagcctactaggtaccaggctgggtaccaaagctaactttgcagttctttcaaaagccctaggaggcagacatcatcttttttttttttcattattcagatgagaaaactgcagcatggacagattaagtgatgtgttccccaggttcacacacgttagtaaatggaggtgctgagagtcagactcggtggcctgacttccaagcccaggctaagtcagactgacagcgagatacccctaaacccccttctctgcaatggccccgaagaaccttggggtttggtattccttcaatcgtggtgataatgctttgattctgaatattaatgtcttgtaaactgtctagttgcagatggcttaacacaggggaaaaagaacttgggctttatctgacttgacctgctttttagtcaaatgcaaaataagttgcgagccgagactctctttaatcctcaatcacattagcctgatgacactgctacattaatttaagtggttaatggacaaagtgggtcaatccagctttagcttaaatcaaggctgactccagtgctgctgaggcagtcttccttaagggaaaagcactcttcttctaactccctgttggcagtctgcaagaaggagtgcccgccctctagggaattgccttttctggctcctgtgatcaagtttctatggtttccgtatcggtgctagataggggaattgtggtctcagtggattaagatggcttgaagcttagaatgccttactgagaggtaaatatttggtcaaaaataatgtggaaattctcttttttttttccttttaattcctgtgcctaggcaggaatcagttggaaatctctattccatagtagatagctaatagatgatatagcctctaacatggtatctagaataatagcaggcacccaataaattgtccgacttgtaaataataactttctgattgtagatctgtgatcaaagcttagtatccacttagttaacacacctccttttggtgtatacaaactagcgcttatacacatatgctgaattttggtcatatgatatgccgtaaactgtgtattgagcaacttaataatgataataataatgacagtagtagtggctgatatttgttaagtatattccatatgtcaggtgtattctaagcatgttataattattaattgtttaatcctcattaaacttccatgaatacgtattggtggctccatttttgtggatgagaaaaagacgcccagaaaagttaaataaagtattcaaagtgacataacttataagtggtagagccagaatttaaacccaggcagtctgactttagatcccaaattccttaactaatttaagaagctaatttaagctaaactgagtcagctttatgaatttcatttaatttttttcctttaaaagaatatatgtgataaataattgtgcatattttgggggtacaatatgatattttgatctacgtttacattctagaaagatttaatcaatggccgggagcagtggctcacgcctgtaatcccagcactttgggaggccaaggcgggtggatcacgaggtcaggagattgagaccatcctggccaacatggtgaaaccccatctctaccaaaaatacaaaaattagccaggtgtggtggtgggcgcctgtagtcccaggtactcagaaggttgaggcaggagaattgcttgaacccgagaggcggaggttgcagtgagccgagatcgcaccactgcactccagcctgggtgacagagcgagactctgtctcaaaaaaaaaaaaagaaaagaaaagaaagattcaatcaagcaaattaacatatccatcacctcaccaacttatcattttttgtgtgtggtaagaaactggaaaatctgtttttgaagaagatttgaaatacacaacatattattattaactgtggtcactgtgcagtgaaatagatccctacaacttatttctccagtctaactgaaacttagaaccccctgatcaacatcttgtctttcatcatcttccctttaatcccccaaccagcctctggtaaccacctttttactctttttctgtgagatcaacttttttagattctacatataaatgagataacacaggatttgtctttctgtgcctgatttatttcgcttagcataatgtcttccagttgcattcatgttattgcaaatggcagaatttccttctttttaaaggctgtataatatttcattgtgcatatatactacacttaaaaaatctattctccattgatagacacttaagttgcttccatatcttgtcaattttgaataatgctattataaaatgaataggaaaatgcagatatctctttgacataccaatttcaattcctgtgtatatctatccagaaatgggattgctggatctaacctcacttaatttctttcttttttttttttttctgagacggagtttccctcttgttgcccaggctggagtgcaatagcaccatctcaactcactgcaacctctgcctccctggttccagcaattctcctgcctcagcctcccaagtagctgggattccagacatgcaccaccacacccagttaattgttttttagcttttagtagagacggggttttgccattttgtccaggctggtttcaatctcctgacctcaggtgatccacccgcctctgcctcccaaagtgctgggattaatggcgtgagccactgtgcccagcctggtttttttattattattatcgttgttgttgttttataacttcagcttttattttagattcaggggatgcatgtgcaggaatttgttacataggtatattgcatgatgctgacgtttggggtaccgttgatcccatcacccaggtagtgagcatagtacccctctaaagtatttttggaggcttctagagttgtgtcttgggaatttcctcgtggcatgtttgtatcagtttacttacctgatttcactggattttttggctgctgtgtgctttgttgctttgtgaagtaaaggctttgtcagcagtcactgtgttaaagccggaacaactgggcgggacccgagggatgttttccttccagtgcccatggcacatctgcctgggtttggtaagtgtgagaaggcagactagtggcaggactcatggacagtgaaatctctgggagtcccgggtgctatagttttaggaaaggcacttatcagaggccaaaggcttttgtattttggcttcagatgcttggggcaatctgaaagctgggaaaataagggaaaggttatacccacaagaggatcttagagaaacagatagcttgccctttctaccttgcatgaaggggccttcgtgttttccggtagatggtacctgccctccaaaccaggtgggatgctaatctacctttcagctctaaagttctacttgcattttacatgtttctaccactgcttccagaaataagagggagctgggattagaagtcgtgaccttaagacgtgtggccagagaggcgtcaccttctgatcccggtttgtttgcttgcgtttctcagggacctgatgcccagaaccctggacgggcagatcaccatggagaagacgcccagttacttcgtcacgcgggaggcccctgcgcgcatctcggccatgtccaaggacaccaagctcatcgtggtggtgcgggacccggtgaccagggccatctcggactacacgcagacgctgtccaagcggcccgacatccccaccttcgagagcttgacgttcaaaaacaggacagcgggcctcatcgacacgtcgtggagcgccatccagatcggcatctacgccaagcacctggagcactggctgcgccacttccccatccgccagatgctcttcgtgagcggcgagcggctcatcagcgacccggccggggagctgggccgcgtgcaagacttcctgggcctcaagaggatcatcacggacaagcacttctacttcaacaagaccaagggcttcccctgcctgaagaaggcggagggcagcagccggccccattgcctgggcaagaccaagggcaggacccatcctgagatcgaccgcgaggtggtgcgcaggctgcgcgagttctaccggcctttcaacctcaagttctaccagatgaccgggcacgactttggctgggattgagcagacccgggctatgtaccttacccacgtggcttatctattgacagagattatatgtatgtaaaatgtacagaaatctattttataataatttatttttaattcataagcaattaattcactaagctgcctagccacactctttagagagttagcttcataatctgttaacattccaaagtgtttaactctagtatttcgttctcttcttcacaattgatggtgcttctattttttcttctcccctacctgttatatttaaaacaaagaaaagcacaacttgagatttttgttgttacgggtattcagccttcagtcaccgtctgagttctccagttgctgcctccttgtcttgtcttgggtctcccattccagcttccctgtctcttcctgcctgtgtacctcgtaggaacgctgagctgcctcaacagggctgtattctgaagggcaggcctcatgcagcagcctccttgcagatgtggtgtcccgtccaatgatgtagcctgaaagccacagccctagggttctgtccctccctccattcagcacatggggaaatttctcactccctttacagggacatccacatcctttttttttcttttttttttttttttttttttgagatggagtcttgctcttgttgcccaggctggggcgtaatggtgtgatatatgcttaccacaacctctggctcccggttcaagcgattctcctgtctcagcctcccaagtatctgggattacaggcatgcaccaccatgcctggctaattttgtatttttagtagagacggggtttcttcatgttggtcaggctggtatcaaactcccgacctcaggtgatccgcctgccttggcctccaaagtgttgggattataggcgtgagccactgcgcccgctatccacatccttctagagtcagaatggtagggtctgttgacttcagcttttgattttgcaggatggccctgtgtcctcctctgccccattccctggttcattaaccagtttgaagtgtatgtagattgttgccccgtctttcccaggtcacatgtgtgagatgcctgggtgctgcttcagaaatcaagatgatctcctttaatttgcatgaaactacaccatgctgcgttccccaggcagacagttctgctttgacacaccaaagaatcccgtaggctagcagagccaccagcacaaaccaagggcgctgggtgtcgagactcagaggggtcagctgtgtccctcggcatcagcgtctaccaaggtgctgctaggtacagagccagccagtgttgggcagcaggctcacagcctcaatagggagaaaagacaaaggcctcaaaatgacaggcagcctgacagaggaaggagtctgacacctcagcttgatgcgtctttggaattcctagctcatctcagaattatatcttagagtgataatatgggtggtagccagtggccaaacagcaagaactaagagtggcccttgcaaaaaaaggttgggaaagctgggcccatattgcctgtaaacccttgagcctgatgctcatacagctgtcccttgttttagccaggtcttgacagaagggttaccagcactgtcactgctctacagaatgctctccccgtgcctctctgttgatttataacagttgggtaaccagatagcaatatagtggcaattgagtagccatatagtaatacaggggcagttggttaaacatatagcaatatcacataatgatatgtttaatttaacctcagttttttaaaccagaatgcttctaccataaaagaattgtgatttcagttatacttccatcaaggaatatgtgggaagatatacatattgtcaaaatggttgggatgggatagttacaaaggacacttttgtatgttgtatgggatcacttgcctgatagtataaggaacattgtatgaaaagatgaaaagatacttcatttttagaaactgatcagagatgtcactggtctttaagtgatgtcttgaaaatccagtatgtatttgcccaaaagttttagcctacatctagctagcttacacttagcagccaaaccatcattgtgtaggttctgttttggaggaagctcatgggggatctgtgtatttcttaggtttctccctgttctccaatgttttatccatttcgtagcttttttactgtctccagaaagtagtgtgggacctgcacttaggggaataccagaatcatagcgtggttctgccttcttgatgagtgattgtgaaaaacacctgcataagggtgctaattggttgtgtattttttcatttatttgaaatcaaactgagaacacctcttttcggtttacagcataacatggcttgaagtaaaaggcagtatccaagtccttcacctggtcttgccctgtctactttctgatcattctgatggtctgatgtggctgttgatgtggaactgcagaagagttcagagaagagtatgcaacaaagccataggaaaacacacaggagcttttccctccccttcaggtccccgccctctttccaagctggacaattttttattaagttgtttattccctgccttaaaactgaaacaggaaattttctggtagaaggagggtcatttagtcacgaacactgaagtgggtcaaaattctattctgggtcaaatccttgaattcaaacagatgtccataatcagtactgatggaatagagcaagtttttctatgtaagacaaataaatcaaacatcatgtgcatctcctcataagggtctgcaagggtctgatggtttaaagttcctaacagatctggttgcagcatctgccggagcttgcaccccatcatcggacggtcatcttcctgctgcagaagttaggtaacataagacttagatttcttcctgttctagcaatctgcaagaccaccaggcttaactttttagctgccagaagacaaacccccttttctgtttcggcaatttgtcctggcacgtgttttggacttcctccgatttacacgaaaagctctgatattcattggagtactttattttttttcctcagttttgtttcttttctcatgtaaaaacaaacaaaaaggtcaacaaaaaaaaattgaggtttttcttgtttctatctagttcatgctttctttgcggtgtttgaacagtagtctgttaacttagtaggtggtacctggaaaggtattttaagtatagtgactgtttaataaatacttaattggatgatggaggaggagaaattgttttcttcccaggattctctttgggggtcattttgtgtgacagatatattttagacatttggagaaacagtttcagatcctgccaggatatttttgtaaaaaaggaaaatggaagattccaataaactagaaacagtacgtatctaagatgctgacacagaagctaatgtgacttttcagcttatcaagaggatggccaataaaacttaaaggtgtggttagatgttttctcacttttgtgacattaatttatcactgagtctcattcaaccaagtaatctaaaatactgtgcaaattctagcagtatgtcttcgataacttggatgttaggatagccaatatgtacaaaaaattaaatcaagtattttgtcctatgtataacacaaattaattttacacagagaaagatgtttctaggcaagtgaaattctggtaattcatactatttctttgtatgaacaaataaaatatattttgccaacatgtgggtacctttatgttttcttaagtattacagaaggacaaggtagcaatattttgtttaataatcccatgtgcgtgcatgcgcacacacacacacacacacacacacacacacacacacacagagtcattctgagggcaagctgatctttcagattttaaagggtccaatccaatatacaactaatccacaagcatttagggtggattttttttttataaatgactctgaagacaagatcggcgagaggggctcgtgtgtcttggtggagcttccccgcagcccccaggaagtgctgtctattacacaggattccaagaatactgaagccgctgcctgccccggtctttcagtgccacaggttcgtgtgcatgggcagccacatgtcacacgacaggtgcaatgtgagcacagcacctatggctggatggattttgataataggtgccttctcttctcacttttgcagagtgttctcctattaggtggagatccttatctgtaagacagagacagaaaggactcagacgaggcagcatttctgtgtctttaatccgtctcaaactaccttctgcttactttttacctggcacaccatctgtacaattagtatttgctactttaaccatttgattcactctctgattttacttaactttaaaaggaaacatattttaagtaaaaagccatgatgtcttgccaacaggaggagatcatcatttttaaaaggcacaatgaaagcaaagcaatgctgttaatttctagcccaggtagtatcactaaagccacactagccttaccttaggctcactcgctgctcctggcaaagattctactgttcaagactggcacataagtgagatttgcatcttgccatgaagaataaatgggacttggtgaaggaatgacttactcaatgttatttattgttagttctatgtatgcctaaaatgtgggcgcccactccccacctccaaatcatctctcgcagttctcttggttttctgacatttttggaaacacagtgcctcatactaagaaaatgcctcggagaggcatggagttgaaaattagtctagcattgtgggaaagcagtggaaagaaaaccctgacttaactagaacagggtgtaagttcgtcagtcagaaaacaagccttacttaagatttggttttcaaaagctagcattctacggagatcagtttcttcaaagctagaaatttgccacttagtgaaataggtgtgtgaaatagaagtgttgactttactttgcaccccaactcatcaattttatgctttttctacagaaaggtactaaaatggacctaaaatctattttttttttttgagatggaattttgctcttgttgcccaggctggagtgcaatggtgtgatctcgctcaccgcaacctccacctcccaggttcaagcgattctcctgcctcagcctcccaagtagctgggaggctcccatgtgccaccatgcctggctaattttttgtatttttagtagagatggggtttctccatgttggtcaggctagtcttgaactcgtgacctcaagtgatccacccgtctcggcctcccaaagtgctgggactacaggcgtgagccaccacacctggcacaaatctacttattaatctgatggcacagtttagagcagtggtcatcaagcttggggaaatattcgaatgacctgaagaaacctcaagagattccaaagcctggctggggggctcacgcaagtaataccagcactttgggaggccaaggtgggtggatggcttgagtccaggagttcaagaccagcctgggcaacatggcaaagccccatctctacaaaaaatataaacacgagccgggtgtggtggcacacccatgatcccagctacctataaagctgaggcgcccacttgagccctagaagtcaaggctgcagtgatctgtgatcgtgccactgaactccagcctaggtgacagagggagaccctgtctcaaaaaagaagaaaaaaaaattctgaagcctgaacacaattcagaccaattacatttaaaatcaccagggctgaggccttaacctgggtatatttaagaagctccccaagagattctaatgtatatacaaggttaaaagccattagtctggagtagttctcaaattgtggttcctgaaccacagagcatcacatagaagcctggtagacatgcaaattcctgcccttctcagacccactgaattagaaacacagggtttaacaagcattctaggtaattctgactcacacctagtttgagaaccacccagctagagcgtagacttcctatttttttaaaattagagagcttggactgctgatgacagctgttttcctctgtaccatgcttctcaccagtaagatcagctatgaagctgtctcttcatataacgctagatctcctttaaggaaactcctgcgtagttgctgttgcagcatttcaaatagttccgagacgctgggcccacttttatcagtcagcctctaactgtcatctgtaatatgtttctggaagtgcctgaaaatcaaacgatagacttgtatatcataaggcatttcttttaagagagctaaaaaatcttttacatccctaatttcccctcacgtagattcaacttccaacaatgtattcccaatgttttgcacttgattaaccattatttcttcttatccttcacaaccgaacccacagttggctacctaaagcacactggctggccattcaaggtcaaagatttagcctggccatctggccatcttgttctcaattataacaagctcatgtgaacctacagttgctatcattagcatctagtttcatttttccattcatacttactattatgtacaaaagatgattaagtaatcatcttattgcacaaagtcagctgtaatgacatatctgtggtctcacagacagccttccccatttgagagtttgggaagttttgcttctacgcaacagacttttgttaatgaactaaaagtggctcaaggatgtcaacgtaccatgtctcctgagaaaggtgcatatgaggaattgaagttcctccccctggacctgactttatacctacaagaaggtgttagagggggccaggcatggtggctcatgcctgtaatcccagcactttgggaggccgaggtaggcggatcacgaggtcaggagatcgagaccagcctggctaacatggtgaaaccccgtctctactaaaaatacaaaaaattagctgggcgtggtggtgggcacctgtagtcccagctactcgggaggctgaggcaggagaatggtgtgaacccaggaggcggaggttgcagtgagctgagattgtgccactgcactccagcctgggcgacagagcgagactctgtctcaaaaaaaaaaaaaaaaaagaaggtgttagaggctcctttacattttctctgttgatccccagcgcctcctgctctggtggctccttggatgtgtagaagctgtctataattcctcacttgttaagaaaccgtaacctcaaaacaaacaggccttgcaggctttctgtttccatatatttgaaaagagaagagagaggcatgaagcctcttttggaagcagtaaacaacaggaagcctccagagctgctgaggaagggaggcatcttaggagagggatgtccaaagtagtgtactttcgttatgatattctctgtgaattggaacacgaagaagctgaagtcagaggtcaattcattcatccagcattatttaccgagtgtctgctgctgctagggacacaaccctaaacaagaaacacttcctgcttcaaggaatttgcattccatggggaagttgaaggacaagggaagatgcaaccacaatgcagtgtgacaagggccgtgaagaggtgccgtggggtgagaggtggggggtgggggtgcacagtagaggaagggtcaaacctataaatctggtatgatgtagccatgggatggggtggtagagggacattatcccatgcaaagatctagatgtgagaaaaatactgcctgtaggaaactgcaggccgttcagcagggaagcagcctggagcggatggtgggaggggtggaggacggctctggaggggataaacagaagattgtggccggtcgcgcggtggctctcgcctgtaatcccagcactttgggagatcgaggcgggcggatcacaaggtcaggagattgagaccagcctggccaacatggtgaaaccccgtctctactaaaaatacaaaaattagctgggcgagatggtgtgcgcttgtaatcccagctactcgagagggtgaggcaggagaatcctttgaaccagggagttggaggttgcagtgagccgagaccgcaccactgcactccatcctggcgaaagagcgagactccgtctcaaaaaacacacaaaccaataaacaaaacccagaaaatcgtactgcaggcaaattaagagcaatccagctgcttttgagctcccaacttctttctccagttgcccacctgacatctctatttggatgtctccttaagcatctgaaatataaacatgccctgaactgaactctcagctctcgtccctaaatctccactaatctctccttctgggagtgctcaagctagaaaacttggagtcatttttgacattttttctcccacattctttacatccaatccatcactgagtgctgtcaagacaacttccagaaaatttcccaaatccatccacttctttctatctcccctgacactatcgctctgtataagctatggtcctatatgctgagccactgcggtagcctaccccagcctcccatgatgtcctcctcctacttcctccaaccaagtttactcacagcagctggaaggatcttttaaaactcaaattgggctgtgtattcctcctgctatcagcccttaaatagcctcccattatgtttcaaataaatgtcaactccttaatgtgtctgggaaggctcgactcaggctcattgttgtatacttatgcctccttggtccccctgctccagccacatcatttctttcagctcctagaaggagccacgttcccatgttggatgcatttcttccaactccttgcctggctaacttatactctgctttccaatcttgacacctccccacgcctgcccatgactttctcagtgtggacttctttaactccctatggtagactgctaccccaatgaaccctgcctcctggcattcacaccctggggtaaccctctccaacactgatctagttgctgggcttgtgacagaagacaacagaatcactcctgagcccactcctggacaagccattaattggcctgcccacttctgcttcctctcttctgatgctcccttttggaagcctgcttctatgctttgagaagcccaaaccacatagagagaccacgtataggcattttggtcaatagtctcatttgagctcccagctggcagctagcatcaactgccaccatattaatcatccctcttgggtgtcctagccttgttaagcacccagttgactgcggttccatcatatggaacaaaagaaccacccagctgagcccaggcaaccaacaaaatcaagagacatcataactgatttttcttttaagccaccaaattttggggtggtttgaaattcaaataatagataattggaacaatccccagtcaaattaacttctgctctttttttttagctcagaaaatccaatcccctttcttcagaccaattgtcacatttgtggttatgtatgtatttgtgtgttttcttattgtctttcttcagcactagtctgcaatttccatgacggaagagatcatggcttcttattagccagcaaggtattttcaacagcacctaagagttgcttaattatctgttgaatgaaagaataaggcgtttagattatatcctgggggggaaaggataagagttttaaacagatgagtgacaagatagttttacagggaaggaaaaaaatgatatttggaaagctagcttttaatgagggcacaatgcttctaagagagcttttctcatggtttagaaacaataagatcattggggtctgaaatgagaagactttgggcatagtttgggtgagaaaggataagacagagagaggttaaaagtgtactagaaataatgtaaaatgtgacttccttgggcagaaaaaaagtaaactaagggattctcattttcttgtgatgaactctggtgataggcatttagggaggcagcttctggtagccccaggcattccttggcttttggcagcaaaactccagcctctgcctctgtggtcacagggctgtcttccctctgtgtctgtgtcttcacatggcattctcctcccaggggctgtgtccaaatccccctcttcttagaaggacaccaatcatattggacacctaatgacctcattttaacttgattacctctgcaaagatcctatttctaaataagcccacattcacaggtactaggggttagcacttgattgtatctttctaggggttacaattcaacccataacagcctgacacctaagttaagttgttattgggaggtgttctcattccactctggtatgcaaccccaaagtctgtcttaatcgctacaggctttgcgaaccttgacagtggaattttggagaccttggctctgctcttgggaaatgaagagaagatttgggaatcgtgtaagagagggaagggatccatcacaatggaaccccaggaaatgggagcctcagaagtgaaagataagcaagggcttcctgcggttccgctctagttattttatttgtttatgaaagaaaagcatgagcgctgaaggctgtggaatttaggaaaaacccaagttactatcagattagcacttttaaaagatgatgttggcctctggggagaatagattggaagaattaggagtagagacaaaggggtcccttggcggcacagctgcagggacccggatgggcaatgatggtggccaggactatggtaatgtgttgaagatggagggaagtcaatgagtttgggaaccatatagagcaaactgaaggaatttagggggtaaggaggcaggaaggaggacaaacaggcttataggttcaacacttgggtgaatattaatgctaaagctttgatgggaaactaacaagggggaacacattgttgcagtaatgtagactgcaacattactcacttaagaatgagggctggccgggcccggtggctcatgcctgtaatcccagcactttgggaggccgacgccgggggatcatgaggtcaggagttcgagatcagcctggccaacatagtgaaaccctgtctctattaaaaaaaaaaaaaaaatagctgggtgtggtggcccatgcctgtagtcacagctactcgggaggctgacgcaagagaatcacttgcgcccagtaagcagaggttgcagtgagctgagactgcaccgttgcactccagcctgggtgacagagcaagactccatctcaaaaaaaaaaaaaaaaagaatgagggcctacacaggatggtagctggaaaaggttccgacatgctcactaacccctgcttttccagttggtttgctttcccaatgttctaacatggccactgttagattgcatgaggtccttaagtgtctgggaacccagaaaatcaggttgaacctttagaagtcagagaaaatcttggctgaactgaggactctggggaaaaaattgtattattttattaagtttaaaaaataatcatttattttgttataaaattttactctgatgttgtatcaatttagctttttctcattaatgatccatggaccagaaaatatataaacattgataacatgctcaatagttgcagaacatttccacttcaagtgtttattcttcagtgattcttggactcctacaaatcctggcatttgtacatcaaagcaacatattacatggggtgttgtattaggcagagttctccagaaaaacagaaacaacagggtatatttttatacacacacacacacacacacacacacacacgtgtattatagggattgtctgacatgattatggtggccataaagtcaccatctactgcatgtaaactggagaaccaggagagctgctggtataattaagtccaagtctgaggccaaagaatccatatctccaatgtttaagggcacaagaagctggatgtcccagctcaagaagagagaaaattcacccttcctccactttttggttctattaggctgtcagtggattggttgatgcccacttatattggtgagggcagatcctcttcactcagcctactaatttaggggataatctcttccagaaaggtggtcacagacacgccagaaataatgtcccagctatctgggcatcctttagcttggtcaaacttacacataaaattaattattgtgggtgtcaagtgatttgaactggtgattgctgacatggtatagtgcggttcaaatttaatttaaccctgtttataacatggtgattttaaggcatctagttgatactcattaaaatctgtcaagctctttcaataagatggactatcttttgtatctgtatttatgtatgagtaatgagctctattggaggcctgcaagtgccattttaaagacctgaatgtggatgtccatatgagtctttgtctttggttcaaatgaccctctacttatgtcatgttggggtctgaaagttggttctgtgagaaaataggagaaagggaatccagtaaggatgggatctatgcacagtctaagaataagggactgttgttgcttcagttcccccaacatgagattcctttttttttggagaccaagtcttgcactgtatcttggctcactgcaacctccacctcctgggttcaagcgattcttctgcctcaacctcccaagtagctggaattacaggcacacaccaccacgcccagctaatttttttgtatttttttttttttttttagtagagatgggatttcacggtgttggccaggctggtcttgaactcttgacctcgtgatctgcctgcctcggcctcccaaagtgctgggattacaggcgtgagccactgcgccgggcctgagatccttataccttctacccacagactcagtccattccactccagatttgaagctctgcactgtcatttactagttgcatagccttgggaaaattactgaagctctctgaacccaagattccttaacagtagcttggagtccataatacaggtctaacaagtataaaaagattaaacgagatttcatctgcaaaacacttcccctaccatctggcacatagttaatatttgatagacattgctttccttcattcactcctcttgagttaattttgatcagggtgaaatgaatattaaaagcctagggttcatttttggtagtatctaaaagcagtcccatttttataaacctggtgtttgatggtccagggtaagtccttcaaacctctgtaggctcagagctgtggaagtcccttctgcccttgtgccattggcttaccatctgaatgagattttgcctcagtttacctgctttgggatttcctgtttcccctggaattagagatttcccagacttcaatctgtttgggtccctgaggccctggacagctcttatacccactgtgatttctgttcctccacagacatggatttgagcccagctctgaacagacagttggtactttgcaatcctcatcctgctgcctgtcagctttgtgcattctgagccatctgttctccatgcagagcacctcttgaggattaaacccccatgagcgttggtgaggcactgcctcacagcggcacctggaggccagctctcggccaggtgggtttccccagcctatgcaccccatgcaccctcagcatctctcacttctacactcccctcccaccactgagaggacggtggggatgttgtgggcaagaaggtcacacagtcacccaggtgtgaagagatgatgcacgttgggactcaatctgtgcctgtgaaagaggaagcatagttgttaaatctgaggtcacagaggaagaactaggagccagtgactaatatgaggcagtctgatctctcccaagcaatggactctgctttaccctgcaaaaggacacacttacagttagctcctccctggctgcctcccttacatgcaattctgtttccttcaccagcccccggctgaagccccaagccttcttcccctttctccatgtccctccctccttttgcagcccaggtcaaattctgtttccttttcgaattcatttttggagactgaagtccacatgttgtcatctccttgttttgaacatcgattgcctattttccctatcatacactctttagcattttgcagttgtgttactcagagctctccagagaaacagagcttacagaatgtacatagatacacagaaagagatttactgtgagggattggctctgtaaatcatgtgaatatgcaggctgagaagccccacggtctgtcctctgcaagctggagacctgggaaagccagtggagtggttccagtccaaacctgagggcctaagagcccggggagccagtagtgtaggtccgagtctgagtccaaaggctcaagaactaggaggattgacatctgagagcaggagaagatgtatgtcccagctcaaacacagcaaattcgcccttcctctgcctttttgttctatttcatcctcaatgggttgaatgatgcccacccatattggtgagggtgaatcttttttttttattttatttttttctgagacagagtttcgctcttcttgcccaggctggagtgctcatcgcaacctccgcctcctgggcaacctctgcctcccgggcaacctctgccttccgggttcagggttcaagcagggttctcctgcctcagcctctggagtagctgggattacaggcatgcgccactatgtccagttaattttgtatttttagtagaaatggggtttctccatgttggtcaggctagtctcgaactcccaacctcaggtgatccgcccacctcggcctcccaaagtgctggggttgcaagtgtgagccaccgcgcccggccatggtgagggtgaatcttctttatgcagttggtggattcaaatgccaatctcttccagaaacaccctcacagacacacccggaaataatgttcaccagctatctgggtatccctcagcctggtcaggttgacacataatgtcagccatcacagtgatgcagtactattgcctgttctctaatcctatccattagtctattctctcagacaatttcatccactgagggatctcacaggcttccttgggtctctgcctgcaaagattcacttcctatcaccttggtctccctgcctccttgtcacagagtgcaagttgggatatttctaatttgctgtcaaaaatattttcggtgggtcccaccacttgcaggaattagtctacagcaaatatcttttgattctcagaatacagcgtgtgccttcacaactccttgcctttgcataaaccatttcctctttctgaaattctttcccccatgaacttttattgtctgttcatttcgtttttcctttttccacattttaaaatttgtgaaatatacatgcagacaaatgcatgaagcatttggagacagtttaacaactaatttatgtcgacccaggtgaggaagtagctcatcatcaacacccagaagcctgctgcttgctcttctctgatgtctcccctccctacctccctagtggttatcattatcctaacaattgtgatcattattttatgactttattgagttttgtccattcaaatatggatccctaaacactgattagttttgcctgcttttcaactttatatgactgcaatcatattctttctaaaaatttatatacatatatacatatatatatctcacacacatatatatacatatatatatctcactcatatatatatacacacatacacacacacacacatatatttatatactttttttaagagactagatcttgctctgacactcagactgtagtgcagtggcatgatcatggctcactgcagcctcaaattcttgggcttaagcaatcctcccactttggcctctggagtagctgggactacaggtatgcacctccatgctgggctaatttttgcttttgtagagacgtgatctctccatgttgcccaggctacaatcatattcttttgtatctgcctccttcactcagccgtctgcttgttgagtatgcagctgttgttctttcctgttctctcctgtagagctttgcattccatgaataaaccatatttgattgatccacatcactgttaatggacatttgaggttttcctttgatttattcttcttcatagtgttttccagccattaagcatattgtttaaagttcatcttcctcaaactgaatgtaaacagcctgagagaaaggttgcttttttgttcaatcctgggtccccagaacctacacagtgactagaatatagtaggcactcaaaatatgtgttgaaagtatgaatgtttacttgacaaacattttctggctctttgaggcattcctcaatcatttccttctgggtgagggcttcatcaatttctccctgcagactttccacaacagcaatgatattaacaacaactgtggttctacagaggcagatggtacagcccaggacagctaagtcgtttgtccaaggtcgcacagttgagaaggcaggagtcaaagcagtgactaagtgtccagccaggttcttactcccagcaacacacttgctcccacagccccacccataggtgtgttcagtttggcccaccagggtaagaattcttatcagcatattatgcacagactgaagtctcacagaggtaaatatctaaagtagttatgcaatttccagggagctgaaccagggcttagactcctgtctcgctctgaagtctactttttttccagtacaatactctgcctcaactggtaaaacaaatatggacaagaatagtggatccctggggccagttgtcttctcttggagctgctttattcttcatgggcagctcacccccatcctgttcctctatttccaagcttatccaaactgcagcccatgggccgtatgtggcccaggacagctttgaatgcagctcaacacaaattcgtaaactttcttaaaacattatgagatttttttgcaggttttttttttgttttgttttttgttttttgttttttttagctcatcagctatcattattgttagtgtattttatgtgtggcccaagacaattcttcttctaatgtggcccagggaagccaaaagattggacatccatgctcccctcctctcccttcccctcccctctcctcccctcccgtcttctctcctctcctctctcccatggccttgtgggctgggctgttacttgagagttatactgcagattatgccatctattcaagctctttctgcaccattaccatcttttaaatttttatttatttttttgcttgctgttctgtgaatgggctggactgtgttgttttagagaatagaaatattttaagtctctgaaaaaaataaattctgaactgaagagtttgtaaaatccaattccttatcttcttgatcattgccaatcccaaagttggtggaataacatttcaaaatgtcatccagaaattggcctggatacgcagtgactgatgaagggcctgacagctctggcacttagcttggaatttatgaatccaaagctttaaaactttacccaagaaacttttttcaagtaccgctatttccacctaattaaggactgtcacacaattataatttatttacagctatcattcatatgtagagtagaattatctaagttttaaaaaaatttctaatgatttttatgcattaactcaatcaagaggctttctaaaaatcatatctttcgtcttctggataaaaataattaacgcctacttattataggaaatttagaaattatagagaaatatgctgagaacgtaaaaatcactggaatcctaccacctggaaataatcatgatgaacacttttagggtaatatttcaaattttttttctgtgtataattgtatgtgcatttatatgtgtatataataaaactggataagaagacatagtttgtgtcttgctttttttaaaatttttttattttttaattttttttttttgagacagagtctcactctgtcgcccacgctggagcgcagcggcgtgatctcggcttactgcaacctctgcctcctgggttcaagcaattctcctgcctcagcctctcaagtagctgggactacaggcacctgccactatgccctgctattttttgtatttttagtacagacagagtttcatcgtattggccaggctggtctcgaaatcctgaccttgtgatccacccacctaggcctcccaaagggctgggattacaagtgtgagccacctcgcccagcctattgttttatttatttaacattacagtgtaaattattaccctttaccagtaaacatttgcagaaaacataattttttaaattttattttctttcaactcatttcacagccaaggaaacagaatttttaatgacttcaaggtagttcatcttatggatttatcataatttggcccttcctctatttgaaattctggatgtttccaattttttactactttaaatcatgttttaatgaaaatgtatacatacttttctattttggaattttttctttttttgagacggaatctagctctgtcacccaggctggaatgcaatggcacgctcttggctcactgcaacctctgtctcccgggttcaagcaattcttctgcctcagcctcccgagtagctgggattacaggtgccggccaccacgctcggctaatttttgtatttttagtagagacgggtttcaccatgttggtcaggccggtcttgaactcctgaccttgtgatccacctgccttggcctcccaaagtgctgggattacaagcgtgagccactgcacccagccggaatttttttttagtctagatataaatagaatcagtagaatggatacagattcaaaggttgtaatctttatgaagacttcaagtcactgttttctctctttgcaagcaatagctacatggagaaaagtggttctgctctagtagcaagtgaaaaaagtaagatacaaaattaaatttttattgttatctcagtgatttaaaacacgtaaaaatattggaatgatatattctagtgattgcctctgaggaacagattatctttcactttgctagacatttaaatgtttaaacactaaggattcttatatataggcatatccattgtgaaaccccatctctactactaaaactgaaaatattagccaggtgtggtgacatgcacctgtagtcccagctacttgggaggctgaggcagcagaatggcttgaacccggaaggcggaggttgcagtgagtcaagaccatgccattgcactccagcctgggtgacagagcgagactctgtcccaaaaaaaaaaaaaaaagttctttgggaaactaatgatctaccctatactatgctctatgctgtgtcctatctgaatggaatcataaaacttcaacatgctctctgggaagaaaaacggttccaggatcaaacttgtttagaaaacactgaacttagtagagctaagcaggcctgctaatatgtgtgcaattgccacaatatagccacagcaatatttttgaaatagaaataggatcatgtcactctttgacttcaatgcattcccattacacttagagtcaaatctgaaccttgtgtggtcaccttgatggccctatgttgtagatccctcagcctcttcagcctcattttgcatgcctccccctttgctcctaatctcttgacaggtatgtcttcttgattcttgagcaggttaagtccttttctgtctccaggattttgtttctcctttgtatcctgcctgaagcaatacattctcattctttaggtctccaagaggcccttcttgaccaccccatccaaaggaggcccctcaccccctggtttattttcctccaatgagctcacaatacaaatgcaaacctgctgagtgcattggaaagggtagaaattttggcctgtgttgcttataatggaatacctgaaactgggtattttataaagaaaatgaatttatttatcgtaattatggaggctgagacatccaagatcgagggctgcatcaggctagggtcttcttgttggtggggactctgcagagttccaaggaggtgcagggcatcacatggcgactgggctaagcgtgccagctcaggtctctcttcctcttcttgtaaagcccacagtcccactaccatgataacccatcaatccattagcctattaatgcataaacccatgaatgaattaatccatttatgggagtagagtcctcgtgacccaatcatgtctgaaaggctccacctctcaatattgtcacattgggaatttaatttcaacatgagttttggaggagataaatattcaaaccatagtagcttattttccagatttgcttcaaagctctactgccaaagacaattggtcttcatttgtcaagtcaataatcccttcgtgttttcagttataacttaatgcattctaaaattaactgggtttggaatattcatgatgccattatgaatatctacaataagagaagacaattgcatcaaaccaaccagctacttgatctctattgcatcaaatgactcgttcactaattccccatcccccacagcccatgtgaattcactaaacgaaaccacagtattgactgatggaatttctttggaattaaataagaacattagatttttttcctgaactggggagtttgaatgggctgagctggagcactgtgtagccacaacccaagtgctgccttttcataagtcagacctgtaacattaccttcatttgaaagtccttgaatgtgctttcatcagctctgtaagtaaactttagcccatcaactagttggtgccaaccatatgggaatctccggggggttatagagtggcacatgctcctggtcatccactcaggtatttgtgtactctttggaggaacagggcaagaggataagatgttagaacttgaaaagcccttggagatcccagagcctcctcctcgactttgcagatggaggaaccgaggtccagagatgtgggaagaagggtggtggagaggacatgaagtcagagctgctgaaacacaggtctcttgattctttgtctagagaccctttgtattagtcccttttcatactgctatgaagaattgccagagactgagtaatttataaaggaaagaggttgaattgattcagagctcagcatggctggggaggcctcaggaaacttacaatcatggcagaaggtgaagaggaagcaatgcaccttcttcacaaagcagcaggaaggataattgccaagtgaagggggaagagccccatataaaaccatcagatcttgtgagaattcattcattatcatgaaaacagcacggggtaaccacccccaggattcagttacctccacttggcctctcccttgacacatggggattaaggtgattacaattcaagatgagatttgggtggggactcaaagcctaaccatatcacccttccactacaatacagtcataataccagaaattaatactcagtacaacagtgggggcaagtccacagttcatacgtaatcaagagccaagcaagaggcccaaaggatagggccaagcagtggaggagttagcactctaccatgactaggagcaggcaggtggcttagagaggtcaggaaggctatgcttgcaaagtggaattgaagccagaggagaaacaagaaaccagggcataactggtgggaggatttcagggagggtctcaaagaaccgaggaaaaagtgaatgcattcctgatgctcagggatccatcattgctttctgtaggccctggatctgcattctgtcccagaaaccttgaacagcttatttatttatttatttattttgagacagtgtctcactttgtcacccaggctggggtgcagtggtatgatcatggctcactgcagcctcaacctcctgggctcaagcaatcctctcacctcagcctcttgagtagctgggactacagttgtgaaccaccatgtccagctatttatttttatttgtatttgtatttttttgtagatacggggtctcactatgttgcccaggctggtctgaattcctgggcttaagctatccttctgcctcagcctcccaaagtgctgggattccaggcatgagcccctgcccctggcctttttcctttgtaaagctgataaacattccctccatgcatatgccatgttttgtttattcgttcattcactgatggacatttgcagtgcttccacctttggctactgtgcgtattactgctatgaacatgggcatgtaatcatctgagaccttgctttccgttcttttgggtgtacactcttaaatattcttttgtatgggttcacactggtaaattctccccttaaggagaaactcacagtcatactgatctctcttaattcacaaagtagaggcagaagtgccttacactgattggggtgaacaactctccagggtttacatggggctaagggttttattcctccctttgaggtgcaggaggccagaggaccttttcccctgatgactgtcaagagtgcacgttactacaagctacagggcagtaatgggaactctgggctgaatgttatggctgccctctgccacctccctcctaaatggttgtaaaaatgggggagtgtgtgggtgagggatgattgttaccttaattattttaaagtcttgagaaattaatcagtgtcctgatgattgtttactctgggccatacaaggaccgacggcagcacagcgagctcgtccagctgttcccagatgttgaaaggagccatcaggaaaatcgaggaggctcatgaacagtgaagctgagaatattttcctaatgatgtgtaactagcaaaaaatgaactatttggtttctaccctaaatttagtttaatccatgacctttatttgctcagaaatgagggagtttgtgactactggaccccttcaaaatggtagctttcttcctggatgcaatgagggtttcctttacctgaaaaatatggctgtgatacaaaggcatagattctcagagacctgctttatttagccatgcaaacaacttgttaatagcacataattgctttataaaaatcagaagacgcaaatttgccatcaaatttggtttattgattcctctcataggtttatttattgtaatactttcaaactatttatgagaaaatggttcactacatactgttagccccagatgaggcacagtgagagtttagtcactcatccacctgttcaaagggtattgatcaaaaacctactaggaactggccgggcgtggtggctcacgcctgtaataccagcactttgggagcccgaggcgggtggatcacctgaggttgggagttcgagaccaacctgaccaacatggcgaaaacccgtctctactaaaaatacaaaaattagccgggtgcagtggtgggtgcctgtaattccagctacttaggagcctgagacaggagatcacttgaacctgggaggcggaggttgcagtgagctgggatcgcaccattgcactctagcctgggcaacagagcgagactccgtctcaaaaaagaaaacaaaaaaacaaaaacctactaggaaccacaggtctcagtcgggcttacctctaagcagagcctgaggaaaggaatgggggttcaggtagtttatttgtgaggtcaccccaggatgcacgaatgagggaggagaaaagtgagacaaggaaggacagagagcccacgaaggtcgtgttaaggaggagggctccgtcctgctgtggacactctgagaaaacatgtggagcgtctggagaattgtccataaagaagatgggggtggggtggggcattacttcctgcccctcattggttgagatgaacccctggagacattaatgtgtctgcgtatctccagcaaattcctaaatagaaagaggcagagacttgaggtaggaggccattggtttgctgggacctgtcctccttcccggcaggtgaacccaaaggtgaggcatgatgacacagagctggggattgctgacatctgctatcccatttggtgctgaggctagggatagagggaggcacaaaacagataccgcttctgctctcacgcatgagggaagacgggctctaaacaaagaagtggatgtgagagtcacattgtgataaatgccgtacgggagatgtcctgggtatgtgcattagggggagtctgacctagtctgcagaatgagattatttctaattccaaataaatggagtcttaatttgtatggtgcacagagtatttaattgtatgctgtaagaaaactggaaaatttggtgttgtgactaattcctataaatgtttgtgctcatcctgattatccaagaatatagagtaccaggtgacaatctcattctggaaacttttggaggtcctggcagcctgagagtgtggttagtttgttctaattgaactgattgagcaggtatgatggagtggtttatgcatggatgcatttggaaataatatgtgtttactaaatgtaagagtaataatctgtctcttgcaaaagcatacacacacacacacacacacacacacacatacctcctgtaaatgttagaaacatatatgtatttgtgtataaatacatgcatatatatacatatatatatacacttctcatagtcaaaattacaccaaacatacaggtttatatcttatttttagttgatgttatttttaaagcattaccatttttaggatacttttgatgagcaaatatagaatgtggtgtattctacagcatgaatataccataatttgcttttatgtccaattctataattagaatgtaagttgcttccaggttcacgttattatgatcagtactttagtggataatttgagcataaaactgggtctgaattttggaaaattttttagtatagatttataaaattccaatttctaggtcaaacagaataaaatttttaaggcttttaatatgtgttattaaattacttttcagaaaaaatgaaatagtgatacaaattttttttaaaaattactcaaacacttgggttctattgattaatcttttttttttttttttttttttttgagacggagtctcactctgtcacccaggctagagtgcagtggtgcaatcttggctcactgcaagctccacctcccaggttcctgccattcttctgcctcagcctcccgagtagctgggactacaggctcctgtcaccaggcctggctaaattttttgtatttttagtagagacaggatttcaccgtgttagccaggatggtcttgatctcctgacctcgtgatctgcctgccttagcctcccaaagtgctgggattacaggggtgagccaccgcacctggccgattaatctttttgttaaaacaatcaatctggttttatattcagggtttttagatgcttttattttcattattgggaaaagagagaatgaaaaatattgcctgagccctatcccatcagatagaatgccaatgtttttacatagacgtaactaaaggatgctataattttctttttcttttttcttgttttttgagacagagttttgctctgtcgcccaggctggaatgcagtagcatgatctcgactcactgcaatctctgtctcccgggttcaagtgattctcctgcctcagcctcctgacagctgggattacaggcacgcaccaccatacccagctaatttctgtagaatttttagtagagatagggtctctccatgttggctaggctggtctcaaactcctgacctcaggtgatccacccgcctcagcttcccaaagtgctgggattacaggcgtgagccaccgcacccagcgaagatattataattttcaagtaatttctgtttcttttgtttttgacaagtccttgatttttattattattatttttttttggtcactgacatgtgaaccttgtttgtgactatatatgggaaggatgtacatatgtgtacatatatgtgtgtatttgtgttgagggatcaatgaaatgctagccatgtcctcctttttttttctttttcttttctttttttttttttttttttgaaacagagtctcgttctgttgcccaggctggtgtacagtgactcaatctctgctcactgcaacctctgcctcccgggctcaagcgattctcctgcctcagcctcccgagtagtggggattgccatcatgcccagctaatttttgtatttttagtagagacagggtttcactatgtaggccaggctggtctcgaactcctgacctcaggtgatccgcccacctcagcctcccaaagtgctgggattacaggcatgagccactgcgtccagccaaaatataattgtcaagtattttctggttcttttctttttggcaagttcttcatttttttatagatcactgacaatatgaaccttgtttatgagtatacatgggaagcatgtaaatatgtgtacatatatgtgtgcgtgtgtttcgggggaacaatgaaatgctagccatgtcctccattttttgcctttcactcttagtgcaggtaggcttttctttgttattattttactttatattttagggatgagatctctctatgttgccactgtctatggagcgcaggtcataggcaccatcatagtttgctacagcctccaactgctgggctcaggatttccttactcactctcccaagtagctgggactaccagcataagccatcatgcctagctgatgttctttttaaccaggaatttgaattggcttcatttcattcagaatgacatgtttatattcttgatgagataatttgtgaaggcctaatatacgaaccaaagcatggatgccttagggaggaatttatttttgttttctaaacaaaaatgttagaatgtttttgctttctacggaacgtttttaaaacttcaaagaaggtaagttcggcatgagaatttctgttttctcaaccacgactctctcatgaaataaacagtgccaggccgccctcccttccaagcttagaaacttggttttttcattgcagaatctcttactttcagatcggaagtaggaggaaaagccaggaggccttgaactgttgggctctttctcatttatttacctacttctatcagcctgaccattggaactgaagagtcgattaggtcaaatggttggtcaatgcaagttaaacaagttacttgcttaaaaagaaaaaaaaataataaaagcaaccttttttcttttaaccactcaattgaccaaatgaaattctccccctcatcccctcccattctgtgcctgtactgttgacagtcagttgagatggccaggacagagcagtgactaggacaaaagagcgtgataacagttgaagttttggccaacagaggggtcagaggccagaaaagcaaaccgagatcaagggacagagataactgggggcatagcccatgcaaatactcggtgaccaggagagtggccgtgtggagaagcagggcaggaatgtgaccacccagctgggtgaggggctgctggcgtggaggcagctgcctgctcagcccagcccagctgcattttctcctctttcaccctggtgagaaccagccttccttcggttctgcctgaggaccctgtaggtgctgaaaatggaatacagctggcaggtagtgggcggacagtgaaaacgtgccctgatattattctgagaaaaaaaaagagctttattgcttcttgtcagactatactatgttttaggaagagttgggttcccccaaagagaaggtgcagggtgctgggagcaggatcctcagtttgtaagaacgcactcactgctccaaggcagccaacaaaaaatttttaaaaagggtgattgaaggttcaacttttgacatgtaaaatccagtcatagcttgggtttcccggaagcagtccctgagacagagattttagtgcaacagtttatttgggaggcgatcctgggaaacaccagaagggaagtggaaaattgaaatgtcgaaggaagccaataaaatatgcgttattgagcagatggcccctgtgaccaactaggctcagtatctctggggaacccccagagacagtgtagagtaaattccagaattatgccatccaagggaaaagggagctgaatcattcatctctcagctgttgcaagctattggtggagggattttcccaagaggcattacctcccaggcttgtcctcactttgcctgtgtggcctccagtggtcagacagaacccaaaggaaaagagccagggtgcggattggcagaagctattctggcccatgtgcagagcatcaagaatgtgtgctgcaaaaggtgagtcggtgtgctccgttgctaggaaagctcagtattgcgctcacagagatatctaagattcagccaggagagtccttattatttactcccccactaatgatcatcccatcaatttcatggatcaaaagagacaggaacacacttcctctggcagctgggtctccagcccttccatctgtttggttgtttttgttataaacttcaggaatgtatctcaaataatgagaatttttttttaattaatcactcctttgtacaagtccaggcttataatgaaaagcaatatgaattagaacaacttctgaggcagcaaatgcctggataaaggaatcaagagggaaagctcaatggacagtcatggaaccacctatatccatttgccaagttcataatttttgagatagcagccttctgacaattttgatgtatgtttcacataatcatctattatcttaatttgtaacatttcttttaaactcaccagagggcatgttctttcagaagctcaattatgtgcagttagttgtttgacaacacttttggcaaatggttattaagagagtaggatctgtgtttttgacaaacaggacagagcaagattcccagcacatgctgctgggaggggacccagggcgtgagacaaatctcctgcagattttttgagaaatgtaatgtattgataagcatggagactgagaagttctgacttcttatcctgtagggtacactcccaatgaggaagggggaagaggagcagcatttaacaaatgtttattgagggtttactacgtgctaaatcagagattcttttggtctcaggacactttatactcttgaaaagtactgaaacccaccaagtgctgttgtttatgtgggctatatctactgacattaatcatattttagaagttagaactgagaatcatgttaaaaattattattaatctatttaaaaataataaaaccactatatattaacataacaacatattatggaaaataattatattttctcaaacaaaagaatatatagcaggaagagtgtcagtgctttaccttttggcaaatctcttttgtgtctggcttgttagatggaagacagctgaatttttatatctgattctgcatgtaatttgttgtaatacgttgtttggtagaagtacatgaagagaatctggccacacacaaatatatggttggaaagacgaagagtattttaatagcctttcagataattgtatatatttttctttgatgtgatacccaaacttgacaaatcgtttgtttgatctttcttttctttcctccctccttcccttcctcccttccttcctctctccctccattctcctcctcttccttcttcttcttttcttcttcaccgttttttttttttttttttgaggcatagtctcgctctgtcagcaggctggatggagtgcagtgatctcagctcactgcaaccgccacctcccgggttcaagcgattccctgactcagcctgtagtccagtagctgggactacaggcatgcgccaccttgcccggctaattttttttttttggattttagtagagacagggtttcaccatgttggccaggatggtcttgatctcctgaccttgtgattaccccacctcggcctcccaaagtgctgggattacaagtgtgagccaccgcacccggccttcttcaccatttttaagtgaacattcacatcgctgtcaatcgtcaccatcatctccagaactctttttgtcttgctaaactgaaacactgtatccattaaacaacaactctccattcctgacttcccccagttcctggcaatttccgttctactttctgtttctatgaacgtgactgttctatgtacttcatacgagtggaatcatacagtatttatctttttgtgacttgtttatttcacttagcataatgtcttcaaggttcatccatgttgtagaatgtgtccaaatttccttcctttttaaggctgaataatatcccaattacatgtatataccacattttgttcattcattcattcattcatttattccttcaaagacacttgggttgcatccactttttggttattgtgaatattgctgctgtgaagatagttgcacaaatgcctgattgagtccctgcttttacttcttttggttatacacccagaagcagaattgctaagattgtgtggtaattttatttttagttttttgagtaattgccatacgtttaagtagtaattacttaaaggttagttgcaatgtggaatctgaaaccatattaatgaacttttgtgacctgttacattaaaattcattggtctgccttgcacattgaataaatctttaacccacacatgattcttcagtttgtatgggccatttgaaaaagactggttcactgagttatgtagcttttccaaataacagtccatctttaatataatataaaacaatcagattcattaatattgcccctcatatcatcagaaaaatcttcaaagtattgcaagctgttaagttcatggtggctgatacaattctgatttttatttgaaagcgtgtattttatctttggcaacaaatgctgccaattgttttccttgaagtgacagcctcactttgttcattttcaagaatgtgtctaacacttactcaagtcctaatcacgataatttgtagttttttaagtaataatgatatctacaggggtaggaaaaaactattttgagaatagtttggatttcacagacttcctgcaagttgtcttgcggatggccagaggctatgagctgtcatttgagaaccactgtgtaaatacaatgctgcttggctgaaaattcatacacatactaaacacatatgtatagtatgtatcttatttgttaagaaaacttattttcactattcaaaaataacatagatctataagtgaaaattcactgaagcaaacatatgacaataaaaatcagcagtaatctcatcatccatgaaatagctataattatttatttatttgtttgtttgttttgagacagagtctctctctgtcacccaggctggagtgcagtggcgccatctcggctcactgcaagctccgcctcccgggttcatgccattctcctgcctcagcctcccgagtagctgggactacaggcgtccgccaccacgcccaggtaattttttgtatttttagtagagatggggtttcaccgtgttagccaggatggtctcaatctcctgacctcgtgatcggcccgcctcggcctcccaaagtgctggtattacaggcgtgagccaccgcgcctggcgaaatagctatatttaataatttgctacctgtgtttccagatagctacctatatctatttatctacgtatttaccttttaaaaataaaatcctattaaacaaattattatgtaacctgctttgtttgtataatgatatgggataaatatcttccatgctgttaaacattatcataaagatactttttaagaaaaggctttacattgaatcatatggctatatcaaaatttatttttgtatttatttttttgagatggagtctcactctgttgcccaggctggagtgcaatggagcgatcttggctcactgcagcctttgcctcccaggttcaagcaattctcctccctcagcctcccgagtagctgggattataggcatgtgtcaccacacccggctatattttttttgtatttttagtagaaaaggggtttcaccatattggccaggctggtctcgaactcctgaccttgtgatctgcccaccttggcctcccaaagtgctgggattacaggcatgagccactacgcccggtctcaaaatttattttaaccaaagccaggagttacttgttataaaaattctgcatgtatcattcttttttcttttttctttttttaaatttgagacagggtctctttgtcacccaggctggagtacactggcacgatctcagcttattgcatcctcagcttccctaggcttatgtgatcctcccatctcagcttcccaagtagctgggactacaggtgcatgccatcgtgcccagctaatttttgtattttttgtagagacgaagttttgccatgttgcccaggctggtctcaaactcctggcctcaagcaatctgcctgctttagcctctcaaagtgctggaattacatgcatgagccactatgcctggccctttcacccaccactttttatttttttattttttttttagagacgaagtcctactctgccatccagactggagaagtacagtggcacgatctaggctcactgtagcctccgcctcccgggttcaggcaattctcatgcctcagcttcctgagtagctgggattatagacctgcaccaccatacctggcaaatttttgtatttttagtagagatggggtttcaccatgttggccagggtggtcttgaacttttgagctcaaactgatccacccacctcagcctcccaaagtgctgggattacaggcatgcaccaccgtgcctggccacacccaccattcttataactaaattattagatatttattactattttcttccatactataaatttttagaagtagtatcctgtagatcatggaatctttatgttttagaataaatatggatgttgtctaattgtcctccaaaacgttgtctcaacctactctcccataggaccgtagagggcctgggtccaggtgctattctttgccctctgatgtgcaccaggttgttcttgttcctgtgatggagtgtttatctctgtgcgttccctaaggagggaggacctgttcaaatggtgtgtgcccatggcccatttcctgtgcaatcgtgtgataccccacacctctaacacacacaccttgatctacaggaaagggcagagctgttgggccccatttcccagatcagccttgcaggagggcacttatttattctgtgttgctgaaacgtcatcgtctcctactcccgaagtttgggtttctgacgatccaatccgatgaaagacacagacaactacaatttccagcagttgtaacttcagattctcttccccacatgccagggcctcacttttcagcttactgtaagaccttgggtctggctgagtaatgaacttggtgcatggaagaaagaaactcatctaacttgaagaaagctaaacctgcaccaacttcctctaacattttctgacttgaccaatttggttgagtatcaaacttgcagaaagagggtagagttgattatggccttctaatgtttttattaatattatttttgattgtggtgaaacacatataacatggaatttatcatctcagccactttaagtgtatagttcagttgtgttaagtacattcacattgttgtgtaactattaccaccatccatctccaaaactttttcatcttgcaaaactgaagctatatacccattaaacacctcccagcccctggtaatttctattctagtttttgactctctctaggtacctcatacaagtggaatcacccaatatttctctttttgtgactggcttattttacttagcataattggcccactgattttaacattctgcttttatgagccagcaccaggatggttcgattagtgtgtttcaaatggataacatcaggattttcacattcctgagtaaatttggtcaggaaaggggatgtataaacattgttattgctcttgaaagggataatttgtctaaatgagtttttagaagaaatggcacagcatcactattaatgaggttgtcagtgaatgtctatctatgtaaagaagaacaaaaccagaatttcaggcatgtattttcttgccatttcatggcaagaagtacaatatcctggaccacgaggattttagaatcactgacagtttattgtctttacccttcctgtaagactgaaggactcctcatttccatggccagtttggaaaaactgttcttgttctgatagaatgttgcagagttgactttgtcttggtagaaatttgagggtggtataagcaccacaacctaaagcattgtgtcagtggcattccaattcttttgttttttgagacggagtttcgctcttgttgcccaggctggagtgcaatggcgtgatctcggctcactgcaacctctgtctcccaggttcgagcgattcttctccctcagcctccctaacagctgggattataggtgcccgccatcacgcctggctaattttttttgtatttatagtatagacggcgtttcactatgttggtcaggctggtcttgaactcctgacctcaggtgatccacccacctaggcctaccaaagtgctgggattacaggtatgagccaccatgcctgcccagcattccaattctttattaaaattaatttagactatcaagaaagtctaaaaaaattgaacactcaaaggattgcagaggatgccgtatagatgtcgaaggctgcctgtgtagaagagggaggacctgtagcaggtgcttctgacttccactcatgacttgctctgtgccaggcacacgtttattgagtgtgtcagttcatcccattttacaaaaatgctatgaggtgcttcttattagtgctattttaacaagtgcagaaacagaagagagaagggttatataatttcttaaaatcacagaactgggaagtgaaggagcaggatttgaattcaggcagtccaattccagactctttggggcttcataagcctatcctaagattccttatctctcaacagatggctgagtatttattagattggcctgttgaagaaaaaacctttaaaaaataatataacacttttacctaaaaaatagtaataaaatagaaaacactagaagtgatttttttttgtgataatataaacctatggtaaaagttttttgaaaaatgtttttttgaaaatatttttgggggctttgcaagtaagaacatttgaaaactctcttctagcctacaaatgattttggaagagaatgattatgctaaatctgattttattagaaatgagaaaagattaaaaattatttaaacctagtaggtaaaaagctactccactaccttggagatcactttaattgtctggaatacgtcaatggaatatcagtcaaacacaaaataagagactgccttcatcatagtacatgaaaattatttcctttataaacaacagaatcaggaatagttctgttttaagaaaaatgttattaaacaaagcaagtgtgtaaggcaggcaaagtggatcacacccaaatgaccacatgcccagcaagtataagtaaatattttaacggcctttcctccttgttattgtgatatatgaagctatgcattactttttgaaccaagcaatcagatttagcagaataagcctatgcatttcatccaggattatgacagcggattaggtaaggcctacagggaccgtacagccggtgattgggctcccaaccacctactgaaaatttaaaggagctttctgctttcagatccctatcacgtcctcgactttcctgcaagaggcagattattacagtcccctgggagccactcagggggagtctcagggcacagaggttatttgattcaattacaagaaatctgatgagtatctacaaggaactcagagctgtggtaggtgagaacagttttggatatacggaaaagatgaataaggcaatgtactggctcttaaggatttgtggtcttttttagggagaagagaaaaaagtgcatgaagtaaagaaaaagcagggaatgagagaaaaaaatggaggagtgagtgccacagcccagtcagtaagtgctacgtaagtgcctggaagagcgagagagggtggggactatgctgggaagtccaagacgcagggtctatgtggatggtagctaacacaatagtggtctccccccaagaagcaaagcaatggcatagaactaagaactctaactcaagacagttttcctgaaatacaacaactacattttgaaaattaccatattcctgagaatattgacccagaatgatcaacactgagacatattctagcaaaatttgggggcttacaaaaaggaaaagaaatcctttgggcaagaacctgaccccgaaagtgaattcgattatcatcagatttttgacaacgatgttttatgctagaaaaaaatggagtaacatctttcagacagccccttcctacagactcttggaaagaactagctgtagacaagcaaaatggctagaggacagtgacacagggctggggttgatagttactctagagctaagattaaatgagggctaaaccggaggcaggacagtgcatatgatggttatacgatctgacaatgcagatataggatgaccacaaaaatcgggggaaatgggaaagcatatgaagacatttttttgtttgtttttgagacaacctgttgcccaggctggaatgcaatggtggattcataactcactgtaacctcgaactcctgggcttaagcaatcctcctaactcagcctcccaaatagctgggactacaggtgcacgccactatgctgggctaactttttttttttggagagactggatgttgttgctatgttgcctaggcagttctcaaactcctggccccaagtgatcctcccaccttggcctcccaaagtgctgggattacaggtgttgtgagccactgtgcccggcatgaaagcattttttaaacaactctcataaattacaccaagtgttagagtgtgatattgctattctgatactgctgtgtgtagtatgggataaacaggcacctttttatattctgcaccttctacctaacctcaggatagatcactggacacaacatcaactttttgcttctctttgtaaacgatgctatttatttatttgtttatttttaccagcaatgactttggaggcttgctttaataacaccactctttctcaactccccaggtttccatttctgtgcgaagggcttccattcattcctgttatccttcttgctttattcctggctgtctaggtttagcatatttttaaatctggaagaatatttatcttcagactggtagggacttttgtttattttattaatctctaaaggtctgtcctggaccactgacagccattgtccatttcaaactcggttgttagcagaattaacctgtcatttcacggaaatagtctgtgttgctggaaaccgaaactttcgcacccaggaatttaccaggcgtttggttcagtgtggtttatttagatgtcgttgaatggccaacggcttagtttctttctctcccttttgtactttctaaggcaaaaaggagaaaatgctgggtactcatcactcagaagcatgtgttttatttttcttcatagacttttctccatgtgattatgatttatgtgtttatgactttctccccatgacagcagggccctttgttgtttgctgttgtttctgcagcacttggcgccgatggcatttcaataaatatttgttgaatgaatgaatgggatgcttttagatattatgtatttgtgataaagcagatatgtgaattctttttttttttttttttttgacacgagtctccctctgttgcccatgctggagtgcccaggctggagtgcagtggcgcaatctctgttcactgcaacctccacctcccaaattcaagcgattctcctgcctcagcctcccgagtagctgggaccacaagcatgtgccaccacactcagctaattttttgaatttttagtagagatatggtttcaccatgttggtcaggctggtcctgaactcctgacctcaaatgatccacctgccttggcctcccaaagtgctgagattacaggcgtgagccaccgtgcctggccgatatgtgcatccttaaaggaaggctctgtgaagggtactaggctttatcactgacatttggaataggagatggaaaggtacagcgaattttgtcaaatgccagagacatattcccaaagttacctcggccacctattgttcctatgattgtctgcacagctgccagacttgagggagtcagtttcagtttttttctgccaaataactagctgttgcatgatgttttgcctaaataaatgaaaaactgaatgaataaaacacattattattttaattgaatgagacagagtggggttatcactcagcaagaatgtatcctatcactaagtatatttttagtaagaaagaaaattagttttttgagctacaagaaagaggaggtgggaagatcctcaggccttacctcacaccttcctcaataaaaccctgtaatgctcttgtcctgggcttcagatctgagaccatcccagaagtcagaaagaggagaacacagccgggcactgtggctcatgcctttaatcctagcactttgggaggccaaggcgggtggatcacttgaggtcgggagttcaagaccagcctgaccaacatggagaaaccccgtctctactaaaaatacaaaattagctgggcttggtggcatgcgcctgtaatcccaactactctggaggctgaggaaggagaatcacttgaacccgggaggcggaggttgtggtgagctgagatcgcgccattgcagtccagcctgggcaacaagagtgaaactctatcgaaaaaaaggaaaaaagagaacacaggcctggagtaatggggctgccatgcacagctgaagacactgaacctcccctttgtctactacacacagctgaggagctgcctgttctttccaacacctaagggtgtgtgataggtcaagcctggctctggggtcccctcactgtccctatcgggccttggacacagaggggtcataagcaccttagttgagtgaggtgagtgagagttgctcaagtgtttcagacaggcaagttgtcccctagtcatggacacaaaaggtcctgggagaaaggaggactccagagaggaaaaaaaaagtatacctagagacccagacctgagagacagatagatagatgatagatagatagatagcctttagacgaagactggggacttggggtctaagtggatgttgggggcctgggaggcttgccaaaccactgaaaaaaaaaatacaaaattttaaatatttaaagctttttgtgcttctagattcaaagcaaaaaagaagactatgatcaaatgtcttcctcccactcctgtaagtctccaacccctggcctaccagcgatctcccttaaggcattcactatttcctgtgcatttttccagagccacattacgcataaaaaagcaaatgcatcaataagtgtttcctttaaaaaataaataaatagaagcttgctatatatattgttttcatcttgaagtttagacattttatattctgtctggagggttgatccatatcaatgcatagagtttcctcgtttgatggctgtatattatttcgtggtatggatttatgatactgcattttaccagtgactgactgatgaacattgacatagcatgcaatcttctgctattacagccaaagctgtaacgactaatcctatatttaggttattccgtaagtctgagaatatgtttctatgtgagacaaattctgagaagtggactttctggacaaaggatatatgtgtttgtgattttgatagatttttgtcaaattgcctactatggaagttgtatcaatttacacactctggcaatttatgagagagccctataaccatgttttaatgggcacttgagaccttgtaggcggccagaaggggactgttaaagttctgaatgctgcagtgaccatagttttgaaataaaaaaaatgaggacccagggaggtacacttatggggaaaacaggacagaatatttatactggagagtgctgtgaattttctggaacctgtggtcacattgacaggctcagacacccatggaaatgcatgcagagacctgtaatgtactgagtgggtgtctgctgcctcaagtccattttggcaggagtcgtactaagactttttttttttttttgatggaatctcgctctcttgcccaggctggaatgcagtggcactatcttggctcactacaacctgtgcctctctggttcaagtcattctcctgcctcagcctcccaagtagctgggattacaggtgtgtgccaccacgcccagctaatttttgtattttgcatagagacggggtttcaccagtgttggccaggctggtcttgaactcctgaccacgtgatccacccacctcatcctcccaaagtgctgggattacaggtgtgagccaccgcacccagccataccaagacattaacataataagacataagacttagacatactaagacatttaaaggctgggttctgtgatcctcacagcctcaggccaaggcactcttcggccaccagaccacttgattcttattttattttattttgaaagaaggtggggagatcacatattagggagtgatttctgtataatcgatgagctcagcagtggcacgggtccagtttcgtcattaaggccgtgtgtacatgatgtgaaaacaacctgtgaattccatccgttcaaatcgttgctagtgttgtggggggcaggaggagatcagttaaatggattgttagatttaattgactggctgctcgaattgatgagaccgttccattaaaatggtcgatccaattaggtcatgtaggatgattgaaaatacaggatcaattgctttggtttcgtgttttcattcagtgcaggcttagctgtggaagtgcccagcaacgtcttcatgcctcatgtctcattttagcacctgggtggccgaagcgtgacttggacttccaatgtgtgccatttaaccctgggcaaagcccaggcaaagcaaacagtacacttcaatagcaatagcaatgaggatagtttactcttgtttttattgcattttggatcacagagggatgggaacagcataatctttttaagaggttcggctctctaaaggtcttaatccagtcctggaaagacagtggtatgcgtgtttgttgtcgttattttataggcccatccctcctaaacacattaccaaagaaactcttggttaatttctttaaaatttggtcacgatccaccaccaggtgtaagatagagccatgtggttaaatagcaagcattgcatgatggtctgagatacagaccagagctggttttttcagtgaaaagctgcaaatgcaaatagaactctttatcaaaactgctaatctcagcaatgttaaataacacattgtatactatagtaatgcttttttgttatgaaagaaaatacccgcaccaaatttggaaaataaataaaagaaaagaaaaatccccagagcctctccagccaaataatgttattatccactttaaattttctttgggaaggggtgggaaaaacaaatcaaattaaatctatattttgggcttatttatttcctgtaagataagataattgagagtaagctatcaaaaaagcgtgtaggtacaatttggtccctttgtaatcctaactatgggcacaaattttattagagtcttctttaatttggggagaaagcttttccacagctctaaatctctaaatcgaaattattaaagtacctgggccttcactttctctcctaggaataagagtttacctgatgatgctttttgcaggcgagacggaaaaacctagttttccttggtaatgtttcatattaactctgagctgacttcaagaaatcccgaaacatgccagcattcaatttcatcccacggcctttgtggtggcaactgccaatcagaagctgccctgtctttgggaatagggtcaaatgagttgattctctgttggctttctgctgctattttttatgaactgaattccaagtgaaatcattctctgaacaagtggtcattttaaaagcctgctcccaaccctgtgcctgaaattcacacatctcagtgaaggccaaaaaaatgctttctgaaagaaccaggctctctttcgatagaaataattttaaaaactttttttttaaaaaaaaaaaagaaagaaagaaaagaaaaacataaactcgacaagataaagaaaaggagaaagatactgaactggtatccacataatttcattgacagacaatctgagggagaggcaggatgcctattttattgagcatctactatgagccatgcacttttgctcatttcaccttatataatcaaggcatgggaaactgagatttgcatatgagaggtggggatagaaggaagagggggaaaagaggaagagagatttccaaagcctgggtctccttctccacccttttttattgtgataaaatatctaacataatatacaatataagatttaccattttaactttttttttttttgagacagagtttcgctcttgtagcccaggctggagtgcaatggcacaatctcagctcactgcaacctctgcctcccgggttccagtgattttcctgcctcagcctcccgagtagctgggattacaggattgcaccaccatgcctggctaatttttgtatttttagtagagacagggtttcaccatgttggccaggctagcctcgaactcctgacctcaggtgatccacccgcctcggcttcccaaagtgctgggattacaggtgtgagccactgcgctgggccattttaaccatttttaagtgtacaattcagtagcgttgtttacagtcacaatgttgtgtaaccattaccactatttcccaaacttttcattacctcaacagatactttgtaacccttaagcaatgactccctaatccccctccccctgccctctggtagtgtctagtctactgtctgtctctatgaatttgactactctaagtgcctcagagaagcagaatcatccactatttgtctttttgtgaccggcttactacatttagcatagtgtcttcaaggttcatccatgttgtaacatgtgtcagaacttcattcctttttaaggctgcataatgttccattgtgtgtacacaccacatttgctctacccatttacctgttgatggacacttgggttatttccaccttttggcagttgtgaatagtgctgctctgcctaggagtgtacaaatatctgtttgagtccctgctttccattcctttgggtagatactgagcagtggcagttttgcatttaagccttactttttcagtatatctctagagaggctggctctatattatgagctggcagtaacagcatcaataacaggaaagaaaactggatgttagtaacaaagggttttaattttgtgttttaaactggagacacacgttaagggaaaaaatccaagtaaaagcaagggatctcatttttccctctttttctcttttccttcttattcctctctgacttctctgcctctccccctcccccaacgcattacagccatccccttctctcctctcaagtatgtgacgagtgactggcctcccatgtttataaggctgctctgcaatgcgattgctcctccaggactttattaatgccatttacgattcccgtaataactaaaccacactgttctccaaacaccaggccttggagaagtcattaccctggtgatcacaacaaaacttaattctaacaggctgcctgctggtgcaatccgctgtgagtaactccctgtgttctggcagtaaaaacaaattaaattaaagatccctgttcaccaaaggcctaattctaatttttgcaaagtttccattaaacaacattgtctacagaaagtgctcactaacatgttccccctgggaatgacagggaaaggaaattccaataggagaattattaaattttctcattaattttgttacaccctcttagcatttattaataatattagaatgatccaaagatctgtcctctttgaattctgtaaagaatttatggaaattagtcttcatcagggagatgtgaattgctgaaaatcagagatgaacaaaacaatagattaaaaggaggttgctttggtaataaatatggtaatgtagagttccttcctttcttaatagcatggaaacatttcagggaacatgttaatattgttttcccttgcaagaatctcagttcaagtatttttttctttttctctttttttttctcagtttcaagtattttaaaaatatttaatgacagtgattttcaccttgcctttgactagcagtccttggaaaaactgcatgttgtctgggaatagcaagccaggtttctctacatgtgggggtgtggataaagtggtacttctggaaagcggtgtgtgagtgggctttccacacaaatcggctggttggtttattgttaccgcacaactacggtgaggtgtttgatttcttccatttcactttatttgacatggattccagggttctctgacagtatttcccaagtgcccgtgggctatcccatgccccgtgcttaaaacatgagggtagagaaattgacagaacaagtgaccaaaatttattgaggatctatcaagttgcaggtaccatattctagatgcttctatagatctttaaaaaaaattaattctcacagcagaaccttcaggataggtatttttatccaacattaatggataagaaaacttacccaacgtcacatagtttgtaagtggcagaacgataattcattctttcatcaatttaacaaactaatttttgagtaacaattttgctcttggcacaatgctagcctctatggttaaacaacagattctctgaaaggataggcaccgaaaaagccagactgtgacaattgaaataaatatctaaatcttcaatgtctgtgcattatcacatgcccataagcctcaggaacatttggggaacccatgacctcaccaaatgaacccaataagacaccctaaagtagcatggtctctcagagaattcaaaatagctgctttaaggaaactcaatgaacttcaatataatatagagaaacaattcagtaatttatcagagaaacttaacagactgaaataataataaaaaatcaaacagaaatcttaaagctgaaaaatacaatgaaccaaatgaacaatgcaatagagggcatcaacagcagaattgataaagcaaaggaaagaactggttaagaagcaaaggaaagaagatggttagagttaataataatatgttacatatttcaaaatagtgggcttgaagacaggctatttggaaatacatggtcagaggagaaaaaaaatgaaaaggaatgaagaaagcctgtaggaactatggggcagcatcaaaagagcaaatattcaggttattgagattcagtagggacttgagaatgccaaaggggtaataaaagaaaatttcccaaacctagataaagatacagctatccaaatactggaaagtaaaaggtcaccaatcagattcaacccaaataagtgcactccaagacatattataattaaggactcagatgtaaaagacaaagaaaggatgctgaaagcagtgggagaaaagaagcaaataacacataagggagttacaactcacctggcagtagacttctcagtggaaaccttacaggccaggagggagcctgatgatatattcagagtgctgaagaaacaaacactggccaatcaagaatactgtacccagaaaagctgtacttcataaacaagggagagataaagactttcccagacaaacaaacaaacaaacaaaaaaaccacaacagcacagtaccggtataaaagcagacacagagaccaatgaaacaaactagaaagcccagaaataaacccacacatctatagcaaactgatttttgacaaagatgttaagtatacacaatagggaagggacagcttcttcaaaagaaatggtgctgggaaaactggatagccacatacagaagaatgaaactatacctttatctcccactagatacaaaaattaactcaaaatgtattaaagacttaaatttaaaacctgcaattacaaaactgctaagggaaaacatagaggaaaagctcaatgacattggtctagatgaagattatttggataaaacctcaaaagcattggcaataaaagtaaatatagacaaatgggactatgtcaaacaaaaaagcttctgcacaggaaagaaaataatcaaagcaaagaaataacttacagaatgagagaatatacttgtgaactatatatctgctaaaggattaataatcaaaatagataaggtactgaagcaactcaacaacaaaaaaactcaaaaaatggtcaaaaaaactcaaaaaatgggcaaaaaaatagacatttcttaaaggaagacatacagatgaccaagagatgtgcaaattctaactgcaaagagatatcaccttgctccaatcagaatggctactataaaaaaacagaaaccaaaaaacacatactggagagaatacgagaaaagggaacccttatacgctgtgggtagaaatgtaagttagtacagccattatggaaaagaggaaaaattgaaaacagaactaccatatgatccagaaatcccattactaggtagtgggatttcatatgcaaaggaagtgaagtcagtatgttgaagagatacctgtgttcatatgtttattgcagcactattcactttagccaagacagggaaccaacctaaatgtccatcaacagatgaatggataaagaaaatgtggtatatatacacagtgaaatactatttgaccatagaaaacaataaaatcctgtcatttgtggcaacatggatgaacctggaggaaattatgttaagtaaaataagccaggcacagaaacacaaatgctgcatgacctcacttatatgtggaaactaaacagttgttctcataaaagtagaaagtagaatagtggttgtcagagaatggggataggatggaggagagagggatagtaagggatgggtcaatgagtacaaagctacatttagataagagaaacaagttctagtatcctattacatagtaggatggttagagttagtaataatgtgttatgtatttcaaaaaagctagaagagatgtttttgaatgttctcatcatgaagaaataatacatgtttaaggtgatagatatgctaattatcctgatttgattatgacacatttatgtaaacattgcattgcaccccatacgtatgcacaattattatgtgttaattataaataaaaatatacaaaaagaagtggtcccaagtaaaagttgtagagaactaaagagatgagagctggaaaagaaggacaaagaaacagagcgatatcagtcaaagtcccgtgaagggtaatgttggctttgttctcacaggagacagggcaggtcacacctgaaagtcatccctagctggggcaaggagctatagtgtttgtttagctgtatacaccagtcattagtcaaaggcttaacccagaaacatgtaaaccccaggcactttcagctatcagggcttctaggcaaagctgacaataaaaattcaagtgctgcatattgggagtgaaagtgcacagggagctgctgtgaacaagagggaaaaagggcatgaaggagcattaacaacattcactacagtgtgaaaatgacacttgtacactctgtcattgaatcacttattgagatgctttattattactttccttaaaaaggtgggttaaatatttcttatgggttttttttttttttgagatggagtctcactctgtcaccaggctggagtgcagtggcatgatcttggctcactgcaacctccacctcccaggttcaagcgattctcctgcctcagcctccggagtagctgggactacaggtgcccgccaccacgccctgctaatttttgtatctttagcagagacggggtttcaccatgttggccaggatggtctggatctcttgacctcatgatccacccacctcggcctcccaaagtgctgggattacaggcgtgagccacggcacctggcctcttatggttttttaaaacaaaattttttcatgtgtattaggcttttatcttcaaattttagtgatcattttgctttttctttttgctgtttgtatacagaggtggttttcaacatgttgtccctggaccagaagaacaagtatcacgggtgggtgaatgggtgaggatacttgttagaaatacaccttcttaggattcatttaaaacctattcaatcagaaactctgggagtgggactccgaagtccagattttagcaagatcttaaggtgatcttgatattgctcaaagcttgggaatcacagctttatggactgactgaagaagtgttacagaaaaaggaaagaaaggaaggaaactttctcctattcagctcctgctttatgctaaatagagtcctaagtatttgagagacataacctcatttatgattcctcctaattcccatgaaatgaatattgtaaatgccatttcatgataaataaacccaagagtcagaaaagtaaatttatttgcctaagttcataaagctagaggcaaggtcaggatttgaatctaggcctgactttgaggccatgtattctagtgtattgggctgtgctaggaaactagatgacagttagtgacattcgcagtgacaagtagacacaagtataggcctattactatagcattgaggaacatgtagaattgcttgggtttctggctgtgacatatagcatgttgagtgcagcatagatcaataagtaccagtggaaaagctggggcaatcgcgatcaacatcacaatgcaagtgtgacaaaaatctcatgttctcaaatattctggagaaaggtgagtctgaaaaggagtagagaaaagtagaagtggtttttgctgttatgggaatagtagctgtccaactacagatatttggttttgcaataataacaaaatgagaattgtgtaattgtgtgctagggataacggtggtagtggtggtggtgatgacagtgatggtggtagagttggtggtgatagtgggggtgatgtggtggaggtggctgtaatagtaatagtggtgatggtggtattagtgatggtggtggtagtggtggtgatggtggagtgatgttgctaacgatagtagtaatgatgttgcaggtggtagcgatggtagtagtgagtgtgatagttgttgcaatgatggaggtggtggtgatggtggaggtgatgatggtggtggtgctggaagcagtaatgatggaggtgatggtgatgatgtaggtggtggtgaaactgaggctttggaaagaagcgcagtttcccaaacttaaaaagtaaaagctaaaattggggtgatctatgcattcattgataatcaaggttaacccctatggagtgcggcttcctctgtgccagaaactatgcttagcattttagtttattctcataagatctctgctaggcagatgccattgcaaataaaggaatagtagatgtgggtattaacactcatggtcacaggtctataagcagcagagccaggaattcacccagagcccacatttgaccactgaactatactgtgtctcagcatctattcagtgcggagttgcatcttcagaatatatgcccagttctttgcaagattttattatgagttgctgcatttttctgattcttccctagaaaaattgttgtagtttctgacattataagcccctgggaactttagttcccaaatttcagttgcttcaaagacttgcatgtgtttgctattctttaccttttcacatttggcacatgaaattgcatttatcccgtccaaatgccatactaattgactgattgaaacaggattctatttcaggcatgctttgtaatcgagcactctcctctggctatagcttcaggtcatccatataaaagaaaagacaaatcttgaagtcttatctctttctgagagagtaaccataatttggcttattttgcatccaactagagtgggttcaaagccaagctaaattacaaagggctccagctgtcactctagaagatgcctttttgtacattcgtctggaaaggatttgttcccatggaggtttctataccttacagatattaaatgctgcttgggatgggtgggctgggacttggaaatcctttcatccctttaagatttatttggaattggggtaccctttgatagagtttgaccgttactgacttctccaaacacctctggttaacagtcatagtcctgcccaagaaatgtggatgctgtgtcttctatgggaggtagtttaggagacaggaaggcataacggcttagcagtgctacccaaagtatagcttgctgactaatgccgctctacaactgtttgttactggttcccaaggagataagaagcttacaccagaatgtaaaccagctccaaaaaagcacactatttagctcagttgatattttttcatagcaagactttcttaatgaaggaagcagtgcatagatttacaatctggtgtaatctccttatcatctcacagaccagtataaaaaagtttcaagtctagctactttatgcaaggctggtttagagcatgattctggagccaaactgcctgggttcaaatcctacttctgccacttattaatggggtgacttggggtaagttatctaacttcttttttttttttttttgagatggagtctcactctgtcgccaggctggagtgcagtcagctcactgcaacctccacctcccgggttcaagagattctcctgcctcagactcctgagtagctgggactacaggtgagtgccaccatgctcagctaattttttgtatttttagcagagacgggctttcaccatgttggccaggatggtctcaatctcttgacctcgtgatctgcccgcctctgcctcccaaagtgctgggattacaggcatgaaccactgtacctggccctatctaacttttttgtggctcagtttcctcatctattaatggagaataatgctagtccttactactattaaatgtgtatgtcggggtgtgtgtgtgtgtgtgtgtgtgtgcacacgagcatgtgtatacaaacacatatatatgtaatattacatagtaagcactatgcaagtgttaataataataatagcactagcaataacaataataattttgtagatgaaacaattagtatagtcccacagaggcagcttagcggtgtgtttctcctttgaagtgagatggttgaagaatagttaagctggttagatcaactttctgtctctaggaatttactccaggtacctcctataagtggcatcatacagtatttatccttttgtgattggctagagatagaagctggggctgagttttctaattgataaggatccaatctatgaagttttatttgctgactttctaaattgccacctctgccctcatctatttctgaaaaaagacagtaggatcccagcttagaaatgaccacgtctggggaggaaaagtggttgttgtgtggttgttgcatgttccaactgacttgttcagctgagagcaagtgtctgcattgtgagctctgcgaagactggacttgtcatgtagcatgcactctataaatatttgttaaatgaatgactactaccatacccagaaatataaaatcgttcatgttgtggatgactcagggtctataaattagcatgctttaaggtataataaaaggaaagtgattttactaaggtgttactctattattagtgactctcttagcactggctcaacactgctttgccaagattacctctggctgtgtgtgtgtgtgtgtgtgtgtgtgtgtgtgtgtgtgttttaagaccagatggagactaagccccaagcaactcatcttttatgtgttacagttgcattctcaataattgtgaacgaaacttgaagtgtattttacaacttttgcttcaggtcttagaattaaatctttaaacctttctccatgctacagaatactgttgaactataatattgaaaggtattgccttcagaaccactgggagaataattctaaagacccctaaaacagagaattccaggaatattgtatttaataaagaagggcaggagaggaaacaggcatactatttttttttctttttttttttgagatggaatttcgctctatcaccaggctgcagtgcagtggcgcgatctcggctcactgcaacctctgcctcccgggttcaagcgattctccagcctcaggcatactattttaatttgtttttatttcctctctttcccccaagggtaaaaatgaagactggcagaaaatattggactaacccagacacaaaatccagatagatagctttgattaaggtgtcaggctctattttggggagctgattttggttttttattatttttaaaaattatttaaatcgtggtaaaatacccacatcataaaatgtatcatctcatttttaagagggcaattcagtggtgttaagtacatttgcattattgtgcaaccaccccaccatgcatctccagaattctttttatcttgtaaaactgaaactctatacttgtcagacaacaactccccacaattctggaagccacctttctactttctgtctttatgaatttaactattcttgatacctcatacaaatggcatcatacactatctctccctttgtgattggcttattttgctcagcataatggcctccaagtttatccatgttgtatcatgtgtccaaattttcttcattttaagggttgaataatatttcattgtatggatataccacattttgtttatccattcactgttaatggatatctgggttacttccaccttttggctattgtgaaaaatccttctaggaacatggtaatacaaatatctcgttgaattctgattttagttattttaaaaggaaatattggtatttgaatctgagcacaagttgcctatggtagtgaccctcagtcgctgcccaggactttataataggcaaattttgtccttttttgttgcttctttctccttctttctcatttttgtctgtctttctgtctctgtttctctctctagtgcatgcttttgtgtgtgggtaggtaggcagagaagatgacttctaccctcacacctgtttgcaagatgatttttttcttttgttttgtttgtttgtttgtttgttttgagacggagtttcacttttattgcccaggctggagtgcaatggcgcagtcttggctcactgcaacctctgcctcccaggttcaagtgattttcctgcctcagcctcccgagtagctgggattacagacatgtgccaccacacctggctaattttgtatttttagtagagatggggtttctccatgttggtcaggctggtctcgaacctcagggtgatccgcccgcctcagtctcccaaagtactgggattacaggcgggacctaccgcacccagcctaggtgattaggttttaccaaagaacaaataggacagttaccaaatacagttgcggagaaatttaccacatagcttaagctttagattcaaggtagatcatctgtaaaagctaatgtcttcacatgagttaaaggtttgaattaaaaatagatccccagaatgtaatattatttttataaaatcaacttaatgtcagattatgtaagccttcatttaaaaagcaaagtcatttgaaacaatatgttgtctagtaaaacagggaaatgatcagattcagaacctggaacataaaccaacaaggacctctatgcacagctatggaattgtaagctatagcattttaacttaattaagaaggagaaaaaaacatgaagtaaagctgtttgaagaaaacggaaaagtgcattttgtatgctggagccccatggtttccctgctgggctccctggtcatcaaggtcctcagtttcctggtgagacctgtgtcttttggagtgacgaggttttaccgcgttggccaggctggtcttgaactcttgacctcaagggatcagccccctcagtttcccaaagtgctggggttatagacgtgagccaccatgtctggccttatctgactttttgattatagtcatcctactgagcataaagggatatctcactgtagttttaatttgcatttatttaatgaataatgatgttcatgggtgtgtgtgtgtgtgcatgtgtgtgtgtctgtgtttatgcttattggccatttgtgtatattctttggagaaatgtccattcagatcatttaagtaggacgtcttaatttttgtgtgtgtgtgccatgtacctcttaggaagcctggtgaaatttacggatcccttttctgaatgaatagaaccacaaaggatactaactatattgaaatatgctattaaagatattttaaaaagcaaatttgtgatacggtattttatgaacctccctattagcatcttaaataaacaaaactaagaggcagatttcttttcctttattttttttttgagactgagtttcactcttgtcgcccagtctggagttcaatggcacgatcgcggctcattgcaacctctgccttccaggttcaagcgattctcctacctcagcctctcagtagctgggattacaggcacccgccaccacatctaggtaattgttgtatttttagtagagacggggcttcaccatgttggccaggccagtctcgaactccagacctcaggtgatccaccagccttggcctcccagagtgctgggattacaggcatgagccactgagccaagcctaagaggcagatttcataatgccatgatctgatgatagtgatgaatattgataatatctggagatatctgcaacaactgtaacaaactataaacatacttttaattttggttggtgacagatcatagatatgaatgtgttgcctatattcataatggaaaaaaatactaaatttcagttaaaagttaatggaaaaatggtgcattttgccccccttccaagatcacagagcctcaaaattctatttgtctccatttttagggggaggtgttcatggtttgtagattaagaaactgtcacagaatgattgatattgtttggctctgtgtctccactcaaatctcatctctaattgtaatccccacatgtcgagagaggggcctggtgggaggtgattggatcacgggggcagtttctccaatgctcttctcaggatagtgaattctcatgagatctgatggtttaaaagtgtttggcagttctccccttgcttgctctctgttctgccaccttgtaaagatgagccttcctttccctttgccttctgccatgattgtaagtttcctgaggcctcctcatccgtgcagaaccgtgagtcaattaaaccttttttcttcataaattacctagtctcaggcagttctttatagtggtgtgaaaatggatgaatacaaaaaattggtaccgcaagtgggtactgctgtaaagataacctgaaaatgtggaaacaactttggaactgagtaatgggtagaggttgaaacagattggagggctcagaggaagccaggaatatgtgggaaagtttggaacttcctagagacttgttgaatagttttgaccaaaatgctgacagtggtacagacaatgaagttcaggctgaggtggtcacagatggagatgaggaacttattgggaactggagcaaaggtcactgttgctacactttagcaaagagacttgttgcattttgcccctgcccaagagatctgtggaaatttgaacttgagagagatgatttaggatacttggcagaagaaatttctaagcagcaaagcatttaagaggttacctggctttttctaaaagcatacagtcatatgcgttcacaaagagatggtttgaaattgtaacttatgtttgaaaggaaagcagagcataaagccttgaaaaaattacagcctgaccatgtggtagaaaagaaaaacccattttctgggaaggaattcaagctggctttagaaatttgcataagtagcttggtgttaatagccaagacaatggggaaaatgtcttcagggcatgtcagagatctttgcggcagccccttccatcacaggcctggaggcctagggggaaaaataatttcatgttctgggcccagggccctgttgctctgtgcaggctgggacatggcaccttgcctcctagctgctccagccatggtgaaagggaccaacatacagctcaggctgctgcttcagagggtgcaggccccaagccttggtggcttgcaagtggtgttggacctgcagatgtgcagaagatgagagctgaggtttgggaaccccagcctagatttcagaggatgtatggaaatgcctggacgtccaggcagaggtctgctgcaggggcagagctcccatggaaaatctctactaggacaacgtagagaggaaatgtggggttggagccactacacagagtcactaatggggcactgcctagtggagctgtgagaagaaggccaccatccttcagaccccagaattgtagaaccactaacaacttgtactgtatgcctgcaaaagctgcaagcactcaatgccagcctgtgaaaacagccaaaggggctgggtaccctgcagagaccatcctttgcatcaacttatcctggatgcgacatggtgtcaaaggagattattttggagctttaaaattaagtgagtgccctgccaggttttggacttgcatggggcctttggcccctttttttggccaagttatggaataggaacattaacccaatgcttgtacccccatggtatcttggaagtaactaatttgcttttggttttacaggctcataggcagaagggacttggcttgtctcagatgaaactctggacttggacttttgagttaatgctggaatgagttaagactttgggggactgttgggaaggcatgattgtgtcttgaaatgtaaaaaggatataagatttgggaggggccagggtggaatgatatggtttgggtctatgtccccgcctaaacctcatctcaaattgtaatccccatgtgttgagggagggacctggtgggaggtgattggattttgggggtggtttccccatgctgttctcatgatagtgagtgaggtctcatgagatctgatggtttaaaagtgtttggcagatccccccaccttgctgtctctctttctctcgccaccttgtgaaaatgtgacttgcttcccctttgccttctgccatgatggtaattttcctggggcctccccagccatgcagaacagcaagtcaattaaaccttttttcttcataaattactcagtctcaggcagttctttatagccgtgagaaaatagatgaatacaaggatatagccccttccagaaccatgacacccatacagggaagcatcagaggaagaagtactgcaatctctctcctcttttactgtttgacttcctgcagtgtctttcattgactggacccagttggaagccagaaggcaaaagggtggagaatggatgagggtgggtggtattgaggcagtggtggtagggcactaagaataaccaacatcatgaccgaaagactagtaatatttggctctctgttgagtttccatacccaggaaatgaaagaagatgaggatcttgccttcaaaatgggattgatttgagagcagtgtttcctaaagtgactttctttggaacatattgggaaacatttcaaaatctattccttattttggttttgacactcataatgcatattagcttgttaaaggctttgcaaagacctgcagtgaggaagctaagttccccaactcatgtaagtgcagacacttttctcattgccctcttattaacagagctctgcaaagcatcattttggaaaatgccagtttagagaatagtaattcacactcacaggtagttacggtcaaggcgcttgtatatctattatctcatttgatcttcatagcatccctttgaactagaatactgagattcagagacggtgagtgacttaccaaagatcacatagctagttagtggtagagcagaaaatagaagaatcacttctgctggtgtccaccacagggctcttatccctggaacataggaaactagcttttttgttttttaaagtgtcattctttcttcacatagcacccaaattaacccagtcacaaactttgctctattgtggggaagctctaaagataactcagtcaacaaacagcttcctgactctgtggtcctgttgcatcttcagtttcaattgcatcaaacagctttcagcttttgatatgatgccagaaaataattttaagaagaaaagaaaaaaaatctgcagtttttctttctctctttctttttttttttttcttttgagacggagtctcactctgtcacccaggctggagtgcagtggtgtgatcttggcccatggcaacctccacctcccgggttcaagcaattctccttccttagcctcctgagtgcagtttttcttatttggaaccacctccccagaaagcacagtggatatgtttcacccccatgcctgctttcagagtgtctttctgcttttagaaaaagactagtctaaagaagacaatgctccatgtaatcactcagatgggagggctaacccgtcttttccctcagtaacggtgggctttctttaaggttgaaatgcttataataaagaatagctcctgaaatgtataaaacattttcacatatttgattctcttaatagtcgtgagatagatggggcaggcactatggttccatatctcaaacaaggaacctggggcttggagaggtcttatggattgcccagctagtaagaatgaaagctaggacctataattaggagacctggcaactcaggccaaggacccttcttacttgtgcaacactgctttgaaagttgaacaacaaagagcacaataatgacgtgcaattgttgtccataagcctgtgaggaatgggcaggtggggagctgggaagttttgagctacgttttgaaggaaaaaaaaggcatggataaataggaaagggagttgggcacaagttccgaggtacacttagtataccatgctggtaatgggggacaaagactcttagtgcctggctaccagttaaagaataagcaggcaaccaaattaggacagtgggaagagaggaaggctggtaattcatgatctgccactaaatagctataagagcttaggcttgtatatggcacttttcccatctattaaattagtaagagggctggacaaagtgcatgcaattataaggtactcaggagcaggtacagaggcataaaaactttaaaaacttttttctttttttttttttttttgaaatagagtgttgctctgtcacccaggctggagtgcagtggcgtgatctcggctcaccgcaagctccgcatcccgggttcatgccattctcctgcctcagcctcccaagtagctgggactacaggcgcccgccaccaagcccagctaattttttttttcttttgtatttttagtcaagacggggtttcatcgtgttagccaggatggtctccatctcctgacctcgtgatctgcccgtctcggcttcccagagtgctgggattacatgtgtgagccaccgcgcccagccttaaaaacttcttaaaattttattttaatagtctttggggaacaggtgagttttggttacatgaataagttatttagtggtgatttctgagattttggtgcatccgtcacccaagcagcatacactgtacccaaatgtgtacagtggatcccaaagtccagtatatcattcttatgcctttgtgtcctcatagcctagcccccacttataagtgagaacatacagtatttggttttccatttctgagttactctacttaggataatggtctccagctccatccaaattgctgcaaatgccattattttgttcctttttatggctgagtcgtatttcatggtgtgtgtatgtatatatgatacaccgtatatgcacatatatataccatatatacatatatacaccatatatacacatatataaaacatatatacttatatataccatatatacatatatatacatacatctctctctctctcacacatttcctttatctacttgttggttgataggcatttaagctaattccacgtttttgcaattagccatccatttttgctcacaagacaactataggcacaagtttcatatgaaaacatataaatgtttgtatgtttccctacaaatagtaatattctatataccattattacttttattacttaagtatatactttttattttattacttaaccacattacctcaaagtctttctattccttttaatggcaaatctgaggagggaagaagtgatatcttgtaattctggttttgttgttacaagcaagattaagctttttttgatagatttcagagcatctctattttgtattctgtaaacagtctgtttatatatttgccctttttaatttgccagaactttctatatattgggaaaattagccctttgtgatatgaggtacatatttttttcttcctaatttgacatttttattgtggctttctatgtttttattgttttgtttttatgttttgtcatgcagaatttctttttcaattttgtgatagttaagattttaatggcttttgagttttatataatattttaagggaggtattacccattctaagaaaaaaggctcatattttattttagttcttttatggattcattttacatatttcacattttttatttgtaatttacttttattatatgagttagagaactaaatgtatctatttatttttccagagggctatccatttcttccaataccatttatttgtaatctatcttttttcctctattgatttaaagtgccaattttatcatatacttcagtttatttctggtctttccatttgattctatttatctgtctatctatttctgtcctggtatcacttcacttaaatttcaatttctataacatatatgtatttaatatctggaaaactcaacatcttctctttcagaactttcctgcctatttttgtcccaagagaagcttttggaggggcctaataacgagacagtttgactagtttcttgctccattctcaagttgtgagagctaatttttctctttggctctgcctacctctgcctgtttcaagtaattactgagttactaataatgagctatccttgagcacagtactttaccctggttttgatctgcttttccagtgtttttattgatttttcctggactcaggaaagaaggattggagagcttattagtaatagagctatgatgagaacctaggttttcctggctccagttcagcacttgccactcttattactaccatgatgatgactgctattattactactactatcgtcatccccatccccctgcttttattaaaatacaatgtgccaggcactgtgcaaaatattttaaatttattatccatttaatctttatacagcactcagaggaggtggagtgtgtttctgtatccacacctagctgttggtggtcactactgtgtgcattccaccctcaaacgcattccctttattggccattttccagcctctgaccaggagccccagcatccagacgtcctaatgctacagcagacaaattgctgtatgagggtgtttttatttccaaagttgtaaattgcaccaaaatagatttcatacaatttacaatgtgtctgacaagaaaacaggttgttgctgccaaatcctgatttttaattgaacctctatttgagtatggaggacaataaatagccctacccatggggggcataaggcaacagtagaggcatttgggtatgtcttctgggaaggccagagggcaaagggcctaccgttttctaaatgctttgcttacttaggttatttttggaaatgcctcttaacaggctgttgctggggagttgatgaattcatgactaccatttcgatagtaatcaaaaaacaaggcagctctattgagctgcagaggctgagcttgggcttgatttgacattaattggatttggtaatccctagatctcctgtttgttttccccacgcctgagaagctattatatgcataaggagaggacctccccatcttgttgaggtcttggctcaatgatggcttgttggagaaagaggatgttggcattttcaaagattaggtaaagaaagccagcacaggcagctgtggtctgagtcttcagccactctggtagtgaattagcatcatacacagatagcaattgctccagcatccctatgtcagcaggggctggggctgctaggagtttccagcagggttgcatgtgttgatgtgtaggtgaggatggtcattgaggctggtgtgccatgtatgttgaagggagagaggagaaatcagcaataaccaagagacaatggccagagtcatgagccctggagataatcagagtgtgacggtgatggttgtccctgaaagctttgtccacggagctgctgagtcaatgttgtggatgcccagaaatattaacacttttttacatttatccattatctcatttgaaactgcaaaagtactgcaatttatttcttactttctgataacagaattgagacccagagatattaacttgctcagagctgcatggatgataggtgagacaagcccacttagtcattttctgatcttcaattttagaatttaatacaaaagtcatcttgcaaatgaaaagtagaaaaattcatttttaaaatttaggtcagacaaattaaattcagttgactttatatttatttgaacaaaagacaattcatgaattgggcctgaattgtcatgaacaaaccaggaaaggttcagggaactccactcagcaacatgggcaggtagtatttatagacaactaaaggaagtgacatacagaaacagcttgactgactatagctctgtgttgacctgatgtgggcatggtgtgatgaggcatggttatggttatggttgtggaccaatcagttggcagcctgagactggctgaagttggctgctgtgattggctaagactcagcaactttttacaagaatatactcttgttaggttgcaatgtgcttgcatactaagtcagtgtatttgtctgttttcatgctgctcataaagacatacccgagactgggcaatttacaaaagaaagaggtttattgggcttacagttccacatggctggggaggcctcacaatcatggaggaaagcaaggagaagcaagtcacatcttatgaggatggcagcaggcaaaaaagagagcttgtgcagggcaactcccatttttaaaaccatcatcaaatcttgtaagacccattcactatcatgacaacagcatgggaaagacctgcccccaaaattcaatcatctcccactgggtccctgccacaacacatgggaattatgggagctacaagatgagatttgggtggagacacagagtcaaaccatatcagtcaggttgcagtttgctacatatggaggcagctttagaccaaatataattaaattgaaaatttccccttttgataagcatctcaattttgagagattgacccaactttgggcattgatgccactgtgtcatcattatggacttgtttggtctcagtacaaattcacaatttatgacatcaagtcagttgcatgattccttatgttcttgtgtcttcattattttaactgtagtaagaccagtttatgctgcatacaagcatttaagactctcttcagaggttatgaggcaagaaagaaactattattctggctattttgagaacaatactgggagactgaaatatattccttaagaggaccccccacagatcaaaccaatcaaaatcaaatacatcaaaactgacccagatgagtaattttaactaagtagtttgtttgctgagttctttcaactgagtttctatcagttgcatgcactcctagtctgaagcaatcatgtcatctaaaacaaatttagcaagagaatttaaagaagcttgctggccaactgtagcctgtgtagtagaacagctatagtagctaatgttggagacagatttctcatcatagctttattgacatttataccaagccagggaaggagcattctaccaaatgatgtccacttagagagatttatgagggctggcaaatttgtctttattccacagtgcaaactcagaggtgtagactagtgttctgtttccaataggctatggagtgacagtgatactgttaaaatacttaatccacattggccccttattttccactattgagacacagaattgcccacacatatagttggttattaaaatcttccacagataaaaatatgttctaaagggatacaaaagacagtttctgtgggacatcttgtgcattaggggtcaccaaaaaggaagcactagtaatatttttctaaagctccattgttgaatcatttcatggttggagggtaccaacaattaagggataagagttatacattggtctacaaactgttagattatctttctcttggctttcttatgctataatttagctgcaaatttcaaaattctcaggtattatctactcttagatttagataaaggatttgaatgcatgaatcgaaaaacctaaccctctagaaagggtacaatttgaacaaatagtcaaacttggaatattagtgcaatttgttacaagctgaaccagagaatctataaaatcatgtacaaatttaggtttcatatgatatatccgatattaagtttcttatagaaactgttgattatgaaatcttcaatattatatgattttgtcgtgtataaacagaaaaaaaacaggaacaggaataaacgtttcatggtgacagagaagagaagtcttgatttgtgatcttgaaaaagctgtccacacctgggatgccatttgcttctgagaagaaacctccctactcagttttaccttgagacccccattgggtatacagttccaagagttttgaggggtcctcttgggttgagagatgtggatccaagatgtgaggccctgaagtttttctgtagagaagtacttggtatggtcccttccagtggaattcaaggacggtctttttcccgtgtctttttaaaaagacctaatcttccggattctgacaggtctggttggcatcagttggtggatcacaaaaggcttcttttacctggtgaaaatatactttggcataatgcattacaaccttgcaatgttgagtcatgtcagagtttatgagaaggagacacatggggttctatcattagaagcattggccttccagtaactttcataaggggcctatctgtgttttccactgggggtagatctgattgccatcaatcactaatacctttaaccaaggcaatctcatcaattcagttagctttgcctgatgccattgtacttgtagtaccttatttaaatgctgtataacttgtccattgaaataaatacctttattattagatttcttcaggaatgcctcataagtaaaacacatttttggataaccttttagctactaatgtagcatcgtctttctgaatgaaaaaacttctgtacaaccagaaaacatgtattaaaagtagcaattgaaggaaatccatctgtaagtgttcaaattattgagcaggtactggaaatgcatcacctgaaagttgttgttgtcttatcagaattacaggtttgacaaatcaaacatgggttataaaccattttagaatgatcatcccaccaactttaaattttttttattttgtcgcttcacgatgagtcatagagtgctttttttttttttttttttttttttttttttttattgagacggaggctcgctctgtcacccaggctggagtgcactggccaatctcggctcactgcaagctctgcctcccgggttcacgccattctcttgcctcagcctccagagtagctgggattacaggcactcgccaccacgccgagctaattttttgtatttttagtagagatggggtttcaccgtgttagccaggaagttcttgatttcctgacctcgtgatccgcccacctcggcctcccaaagtgctgggattacaggcgtgagccaccgcgcccagcctagagtgcttttaataatggaagttttaaggactcaggaaggaacaggtggctgtccaggctccccatgagtccatgcttaacactgaatttacatcctcttacattccagttttgtttctccaattcaggtgcataccactgtttattaaataggttatcataggtaatttgacttggatcaatttgatggagtttcttcaaatcacatatgttaacaattccagtactgcctgacatagcatgaaaacctgccaaatcatttccttggtattcaattaattcttgttgtgcttgatgttggtttaacagttctatgaaaccaatccatttttttcattagagttctgtgaattcttacccaatccagtggtatgatcagatttctagagatttcatacaatttctggaatgcatgttaataatccataccaatataacttaagtgaggtttagcattacttattatttgataatgctttctatacaatttcatatatcaaataagccaaatctgtttaatatctctcttaatgtaaggaaagatattattttaagatgctccaagggccatctgaaaattcttaaaattaacttaaggtcaagaaaaagatttaatttagaatttgattttaggacatttgtcaaaaatatcaaggacttaaaacacttcatcaaaataggatgacaagtcacttgaaacaataggcattcacttaaccagagtgataagtaaagacgtcaaaggcaaaaacagaaaattacgtagccacagaaaaaccttagctcttttaatagagaggactcagttttcttacatgatccaaatcctaataaatacatcatgaagtggaggaaatatcatagtaagacacagaatcttttctcctaggccaattacctaaaagattaagaaatcctttcacattttcctattaagagcaaaccaatactccaagaaaaccttgtttttttaacagaaaggatgaacttctagttttgtgttagtgtacttttgatattaatgcttgagtttaagaaaaactaataaataattctcttctacttatttgattagccagtttgaccacacataaaatttctttcaaaggattcatcttccataaaccttctacaattttcttacccttcacttttttgtcctatgcttttcttctttctcattttgaaataaccagtcattctaatttaggataaaaattactctctttttgccttaacaaaacagaacatcctcataacttatagtttttattatgaaaagcatatattaccttctttgtatacttgcatatagagttgtttctcttattattactagtgattttatttacatatattaattagaatgttttacccctatgttccagtgaacaccatggtgcaaataattgtgaactatctgtcacaccagcaattttgaaccataatatctagaagatatctaggagcatgtcctttttcttttttgttttcttttctttctttttgagacggaatcttgctctgttgcccaggctagagtgcagtggcatgatctcggctgcaacctccccctcccaggttcaagtgattctcctgcctcagcctcctgagtagctgggattacaggtgcccaccaccatgcatggctaatttttgtatttttttagtagagacagggtttccccacgttggccaggcaggtctcaaactcctgacctcagatgatcctcctgcctcggcctcccaaagtgctgggattacaggtgtgagccaccgcgccaggcccgcatgtgctttcttacagtacaatttgttagtgtggcacagagcatgtttactaacagtctcagatagttttagtctctctgtaataagaaattttttgtagaggaggcaaaagtctgtctctatcctcttagtttttttttttctaggcctgaaaattaaattgttgtttgtatagactttcctcagtgtcaactttccattcttgataagaatgttagaaacttttagtgtagggagaacctctttcacctgggaagtgtaacttacttacatctatttaactcacttgttgtttctttttaataattatgcttggatttctcataaatatgagacattaaacagctagacatcatcttatgttttttttcttgctgataaatgttgtaatatagaaggccgggcacggtggctcacacctgtaatcccagcactttgggagtccaagacgggcggatcacgaggtcgggagatcgagaccatcctggctaacaaggtgaaaccccgtctctactaaaaatacaaaaaattagccgggcatggtcgcgggcgcctgtagtcccagctactctggaggctgaggcagaagaatggcgtgaacccgggaggcggagtttgcagtgagccgagatcgagccactgcactccagcctgggcgacaaagcgagactccgtctcaaaaaaaaaaaaaaaaacaaaaacaacagcaacaacaacaacaagaaaacagaaatgttcattgcagtagtactcatgataaagtgataaacatcagtgagggaatagctaacaataccacagtatattcatttgataattaccactgtaggctaataaaaggaaattgagaagaatttaacacaaaacattaaaaaaaagtgtaatatagagataacagaagcttatttccagcaaacctaattaaaaagttgtgtgtttgtgttgtatttaatggtgatgactctgaagataagcctgttataataaaactaacaatattcttatttaccaaaaattacccaagtcgaatgaacttgaaagcatctgggctagttcttatttttccaagagaatacttaatttatataagcacttaattttctttaagccaaataaatagggctcttttacaatttaattttgatgatatcataaggagatagaaaaatatcacatatatattatacatacagacaaacatataaacagaaacagatcttatagttttcattctaaaattttagccatgtgccagtacaaaaaaacaagcactttgaatgcctggactcagcttccttccttccttccttccttccttccctccttccttccctccttcccttcctccctccatctctccctccctttccttccttttctcccttcccttcccttccttccttcccttccttcctccctccctctctctctctttcttttttctttctttctttctttctttctttctttctttctttctttctttctttctttcttcttttctttccttccttctttctttttctctgcctccctccctccttccctctctccctcctccctccctccctcctttctttctttctttctctcttttttcttctttctttctttctctttctgtcttttgtctctttctttttctttcttttgtcttctttctttctttcttttgtcttctttcttttatttcttctttttctttcttttgttctttctttctctcatttagggggtacaagcacaagtttcttacttaaatgcatatattgtatagtgaggaagtctggacttctagagtacccatcatctgaatagtaaacgttgtactcaataggtaagaaagcatggatacttctaatcttgttttatggtcagagattggttcatcctttctatgtttgtttgtttgttttcaagattgactgatggaccaattagttgtgtatttttcttcagtaaagcattttagagcatagcaaagataatgacaatgggaaagaggtagacatatttggcaaagcatatggtcagcaggtatttaagaggaggggcttcagttgattcagaggtttctattgaagaagcagaatcaaaatgagaaaagacagaggactagttcatgtatacattttaatgatccaagtgtccgattgaaagagggatctttagaacttgatttgaaaaacctctccacaggaatattattttttctctctgagatattggttgatcattgtcccaggagtgaagtccttgagggaatacctctagtggggaaatagtccagggcaaagggaataggtacatcatataactggtataaaggtggacaatttatttttcaatggcctggttatttacaataaggacaaacatcttggggcatagggttcattagtataggatttctctatttctctgtttgggcttaaaatatgtatgaggaggtcctcttggtccctgtagctgttataactgtaaaggtatgtgcctgcttgtcctttataagcattattccccactgtggccactgtaactctaagctacctttggtaaagctcacacatttctccaggttctgggcccatagttcttatacatgaaattagctggaattccagatagagaagttctggccccttttatccagaccaacccatgattccctatctttaagtaacattacttacctaatgaacccaattcagtttctctctcacctagttggaaacctgaggccttgctacagaacccggttctgtttctatggcaactttcaaacatagtctacacttaaaatgctcaaataaattcttttgaaagaggtcaaagcctaggtttgtggaactccaactggagagatagacaactcttccatgaccccagttgctgagagaaatcagtggtcacaatgggccctgtgaacacctttgcttggtcactctgtgctcctggagtttgctggaggtctacttccagtcccacttctaatgaccaactgttaaaggaaaaactgtagacaaattaaattcaagacagtttattcaagcaaagaacaatttatgaattgggcagcactcagaaccagtagaggttcagagagctccacctggcagtacagcctaccagtgagcaggcaatatttgtagagagaaaaaggaagtgtcatacagaaacagcttgattgctttgttacagcttgtgctataccttatttcgacatggtgtgataaagtatttgccttatgtaaatatgagctgatcagttggcagtctgtgattggctgagactcagcaacttgttacaagaatatgctcttaagttaggttacaacctgtttgcatacttaggttgcagtttgctttaggttatatttaatttaatttaacatacctttaaaaaaaatctgttatcccaacccagtgtctcccacaaattctatacaaggaaggattcaaaattaatacaatgaccttatgtaacacaaatttattgatcactttctgggctctggcactatgttagttgtaggttgtgataccacaagatgtgacatatttttaagatgtttttcatggagactttaaaagtcaatatgttaaaatatctgatagaactgtcctccaattattattcacatattttaaaatcatttacttgtccagaaaattagtgaaactctttgtgaacttcagaggctatgtatggtccattctatggaataatgttgatgatgggagattttaatcttttaagggtgggtttgagtttcgaaagctgacaaaatcatttcaagctaagtctagtaaataaagtagataatacgatttttgttcttaagaaaatgtgctgttacagaaggcaatgtttttcttgtgtgctttgtgggtatttctgaaggtgattcttaatactttactaattggaagattagcaagtgtgtaaaatggtgaaaacattcatatagaaaaatgaattctggtgtgtttgtagtaaaaagtcagtgtagtcaacccttgaacaatacaggtttgaacagcacaggtccacttgtatgtgaattttcttctgcctctgctactcctgagacagcaagaccaatgccgcctcctcctcctcctcagcctacttaacatgaagatagcaaggatgaagattttcatgataatccacttccacttaataaacagtaaatatattttattttcgttaggattttcttgataacttttttttctctagcctactttattgtaagaatatagtacacatgtagcatacaaaacatgtgttaattgactgtttatgtcatctgaaaggcttctggtcaacagtaggttattagtagttaagttttgggggagtcaagttatacatggatttttggctgtgtgtggttggttgggacctctagcccccagattgttcaagggttgactgtattaatactgctatagttgtatcaatgcttagaatttagaacatacccctcacctgagaatcaagtcctaaggccctccaatatttagaagttggacaaggaaggaaccagcaagggatcctgagaaggaggaataatcagtgatgtagaaagaaaaccaggagaggtttgtgtcattgaagccaagagaaatttgcatttcgatatctggcaatatagagatattcattgagagcagtttcagtggaatgcacagatcaatggtcagatctgaatgatgtttaaatatagattattcttccaaaaatccggctgaaaggagaagagagttaggatgatatagaaggtagacacagtgtcaagaaagggattttataagcataagagaaaattgagcatattgaaaaaataggaggatatagggagaaggcgatgatataagataagaatagataattgatgtaggagatcagctagaacagagaggagacacaatcacggatatggaggagaggggaagttgactttaataaagagaagagtcagatcattcacttaatgtgggggttgaatgtgtagatttgctataaatctaacagttgaggtcgatggtctcagttttcttggtgaagtaggaggcaaagtttttaaagtggaaagttaagttttggtggagggcatgagttaggtgtaaacattttgtagattgctaatggaaaaggagcaaagctgcgtgaggaaaagtaaatggtatattggatcatcctgaatgtccagttgaacttggagtctggaaatgacaattgttcattgatatttttttcatttttttcataatatttagcagctcagtaatggagctgaggaggcagattgtgggattatagtcttgctgcgtgggtttagtgagagaacagtggtacatgaagctgtaggtgatgaagaaagaatgtttcagatgatcaataatgtaatctaggcaggattgggaagtaatgaaaactgtcctaggggtctaggggctctaggacctcttttgaaaaaggaataataactcagaagagtttgtataaagacaacttaaaaacaaattgttttctacctgcctcattgggttatcataaggaataaaggagttaattcatgcacagtgctttgaccactgcctagcacatcagaagagctgaggaaaggttggctggtgtatcagatgctattggtgtctagctctacagtccccttcccccctctgggtttaactgcagctctggaggacagttctagagaacatccatggcctccctgatccccgattccacctcaagagcctgcagggccatgtccaaagcatcaagaattttatcacattgtgcctagatgcagataggaaattggggagtactgtagttgtacgtaaatgccccgcctcgtgtcttcccattggaggtgcattctagagggtttctcagatggtctctgtcaggactgatttgagctacccacaagggtaatgagctaatatcatgcactgtgtaggcatttatcctttctgcctgtctctttccctgcttgtgaaatcatatgccaaatatactgattacacttaagtctttgtaatcctgcttttaggatgacttggggtgggggaaaactaaattaagagaactattttaattgttgtgattgttattgttaatatgaatatttttattatgatctatgattattattatctattctagatatttagaaattattacaggaactttttctggacagacaagaacctaagtctgaacatctaaaaggctcacaaagaatcaagcaaatttattgaaagagaccaatacttattagacctatcttcgtgaactgaagatcgagaaaaaaattccaagaggcatttggacagaaaagcatgttgactccacaggaacaaaaatcaaactgcattcaaaattctcctctgcaatgtctaatagcaggagaaataaaatagtaccaacagagcttcaagggaaaaagactgcattctaagaatcctatatttaggaagttgttcaagtgaaagggtaatggaagaaatgttcttagatgtgcaactcactgttataaccttttaaacaaagccctcgaagacctgatttaactgacagtgaatgaatctaaatacagagctgtgggatgtgagagtcacatcagtgaccactgaaacaagtataaagaaaattaagtctagatgattgttttacatataattataaaacagaataaaagtgtaaaacgcaactcttggaagaggatatttatagtataaaaatggcctaattataataatttgaacctaatgttttgccgcacaaaaatagaaatgaaggagatagaatggtaggagaaaacacttatttcctcattattcccaagagggatattatttaactcttgataaagataactggaaatacaaacaggatgtatcctttctaaattactaaaaaaaaaaaaaaacaaaaaaaacaaagaaaataaattccatgtaacaatcatactttatgtaacacactgaagtttttggtctttaatcttcttatctccagagattgctgtgactcctcgtccactctgtatcatagcatcacctccagtatcattaatgcaaggcaccccatttctgaccacagcttccttcttttccttcttggctttatttttatttctttatttatttttgagacggagcctcgctctgttggcccaggttagagtgcagtgccatgatctcagctcactgaaacctccacctctcaggttcaagcaattctccagcctcagcctcctgaatagctaggattacaggcacctgccaccatgcctggctaattttagtatttttagtagagacagggttttgccacgttggccaggttggtcttgaactcctgacctcagatgacctgcctgccttagcctcccaaagtgctgggattacagacatgagccactgagcctggccacgttcttggctttttaattgcaaccattgaaatagatcttgatttcactgtgacctctagcttctttatcttcaatttgccccatccttcagccgtcccctttctttagttttctacctgtccaggttagatttcagggtccattgtttcagcgatagtactgccaaaatcctaaactccctcgcccctttgggcttttgtcagaccccatctggccgaagaccattcccagagcaacccacactgtgtgctgtctctcttcttgtatttaagcagctggagaaaaacacaacagagcagattgtaccatcatatattcatgagcatccattctgaatgggcaccacagtgccagaatccttcagatatctctggtcaatctatagtccagcaatccacaatgaccattccagatcttctctagcttccttaaatgcccaactttcctacccatcaacggatgcctttatttcatatttcacagagataatagacactgtcacataaggccactccccccactccacacccccaaatcctgctaccaaactcactaacataacagcatctgtacccatctggtcctccttcctgcctattccatagaggagctgtttttctttctgaaagagatcaattcctcacatgtgctttagaccccatctcctttctccttcgcaggaatcttataatttaggtggttctgtatctcctgaatatccaatctcttttcaacctcatcaattgcttcaaattgtaaacattaagcaaattatattcagctttcaaaaaaaaagggaggaaatcctgtcatttgggacaacatggatgaaactagaggacgttatggaaaatgaaataaagcagacatggaaagaaaaatactacatgatctgacttacatgtggagtgtgaaaaagaactcagaagcaggaagtagaatggtggttaccaggggtcttaaggggttggagggttgggaagatgttggtcaaaggacacaacatttcaggaggaataagttcaagagagctattgtttcacacgggaactatggttaataacaatgtattgcattcttggaaattgccaagagagtagattttaagcgttctcacaacaaaaatgattagtatgtgaggtaatgcatatgttactcagcttaatgtagccattccacagtatgtacaagtttcaaagcaacatgttgtatataataaatacatataactttggcaatcaaatcaaataaataaaagaaaataaaaataaatggagagatattataaaaattctactgcattaatagtcactaattccagtgctttgtattcctttgtggaaaggttttccaatcgtgtggcactattgactttttttttttttttggtgacggagtctcgctctgtcactcaggctggagtgccgtagcatgatctcagctcattgccatctctgcctccccgggttcaagccattctcctgtgtcagcctcctgagtagctgggattacaggcacatgccaccatgcccagctagtttttgtatttttagtagagatggggtttcactgtgttggtcaggctggtctcgaatccctgacctcatgatccacccgcctcggcctcccaaagtgctgggattacaggcatgagccaccacacccgaccagcactattgacatttgagtccatgtaattctctgctgtggaggctgtcctgggcaatgtagggtgttaagcatcatccctgacttctacccattagatgtcagtaggaccctccccgacctgtgacaaaactcctgatcttcttctgtttcctctaacctcctgatcttctatcttctcccctttcctctaaactcagtccactctaaagatcttagagaatgacaacattatgcatacagttaattgcacaagactgaaatcagagagtcagccttgataccaccttcttcttcatttttcatgtgtgattcatcatcaaatcacattatttttcacttactaaatataccccaatcccatccatcttattctttcttcactgccacctcactaatccaaactatcataatttcttatctggaccactgcaataaattcctaacttcatcctgcgtctttgacttccttccaacttgtttacactatagctagtgtacttttcaaaatataaatcttgcaaacccctcacccccaccaacttataatctaaataaccaattaaccaacttatgtctttgtaggtataatctctgcaatatactcctattcaaaagctaagaaataggtaggatccaaactcaggtcaatttatgtctataaagagacagtttttgagtacttgagtaagtatcaattccaaatgagagagaacactgagtttacaggagagaaagaggagagaatcataggtgtgatagcaagtgtttgcactgcacacacatacaaaaaatcaagagcttctttcaaatttatgcagttaaatttcgtgttggtttgttatccttgggagatgtctatacctcctattagttatagggatgaagtagataagtagagggttatgcaggagaaagtttaacaaatctttgctttacaagtatgatgttcagtcgcactgagactgttttctaagtatcttgtgggacacaaatagaaagatgaataggatgttgtcctggttttcaaagctctacttgaattttcctgtctcatcatttacctttcctgtctcatcctttgcatttcctgtctcatcctttgcatttcctgtctcatcctttgcatttcccttctcatcatttgcattacctctgccaatgctttccacctcccaaaactccatcatttcttccttttccactaacattttgcacatggctatattgtcatttttcctaacctaaggggaaataaaaaatccaacaagaccttgttcaaatcacattccaaataaggaggaggaatgagttgtaagagttttagaggaattttaagctcctttttttttttttttttttttttttttttgagatggagtcttgctctgtcacccaggttggagtgcaatggcacaatctcagctcgctggcaacctctgcctccccatttcaagtgattctactgcctcagcctcctgagtagctgggactacaggcctgcaccaccatgcctggctaatttttctattttagtagagatggggtttcactgtgttggcaaggttggtctcaaaactcatgacctcaaatgatccgcccacctcagcctcccaaagtgctgggattacaggtgtaagccaccgtgcctagccttaggctcttttcataaagaacggccaaacacacacacactatctgaaatcagatgcaacactttccatttgaaatctgtctctctgaatggaaacaatgaagtgttgcaagtttatactcttgaagtaaatgaggaccaaaaatggataaggaaaataaaatgggagaactctgaaagatcagagaaggtgctatcaggtgatagaatcagataaaaggatttcctataaggcattctgctggtaactctataaaaggtggcattgttactgttgggtaaataaaagtttttgatttgaagaaccctctccactctttcctttaaaaagggcaggtgcccgggcgcggtggctcatgcctgtaatcccagctttttgggaggccgaggcaggatcatgaggtcaggagatcgagaccatcctggctaacacggtgaagccccgtctctactaaaaatacaaaaaattagccgggtgcggtggcgggcgcctgtagtcccagctactgaggaggctgaggcaggagaatggcgtgaacccgggaggcggagcttgcagtgagccgagattgtgccactgcactccagcctgggcgacagagcaaaactcccgtctcaaaaaataaaaaataaaataaaattaaaattaaaattaaaattaaaaggggaggcaaccattacaatctggtaacaagaatgctaacatttgaaagctttgattcacttcaagtattgtcaaacacacacacacacaaacacacacatacacaaatcaatcttttaactttgacttcacaaataaaaagccttcttatgctgggcttagatcagggtggccgccagcatgaattcatgtcctctgtgaagaatggaatatcaaagtcagagatttcagattgaagagtccttagggaacactgggtttagaggttttgaaactttttaaagcactggaacactttcttcagttagaatcctacatagaaaaccaatatttaaaagatgagagcagaagtgagactgatgaggtggaaacaggagaattgggtacaacgaaccccatttctggtaccttccagcctctgagcaggtatctgaagcactgtgtggaacgctgggactctttggtgcattttttcacaacttaggacttagtcttattctccttgcttacaaatgaggaaactgaagcacactgaataaaaatgtcttggccaagcgccatcacctgtacaaaaacagatccaaggatgacaacaccccctcgatatagatgagtggctaagtgcatgctcccaatgctctgattatgatgcctccttaacatttggttggtggagcaagttcctttttggggacaggaagttgttggaagattatttaaagggtcatggaaggatcatggaaatgatgcaagtggatgacatgaaggaatgcagctttggtaccctatgctgggacccaaaaagagcaggcaaggcagaatgttggttgaaaaaataacaacaacagcatcaaaaccagatgtacacatgcctgcatgtccaattttacaactaatgctgtcgtcctatggatacctcctggaatgtaggaggattctgtcaattaggatgttccagggctgtggccagtgttgtaagcatgtctcatgagaccctgggctagaagcaaaagcaatgtccaggcttcaagttaacaccacctaagtcccagacggctgcccacttcagcattctctgtggtaatctctggagattgtggggttcaggctctctttcccgtatgccacttctccatctttaggggctgaaatgaccatgtttggctcccaggtaaatggatcatgagctcctcctgagtatgactctcacctttcatcattgtctcccttgtgtctggcacattgagctgtatacagagcggccctcgataaaagtcatacccagagcttcagaagtggtcttgttggaatggagtttcctggcagaaactaagctgagtggtagaatgaagacacggtattgggaggtagaaatggaactggctaataatattgactccaccactaacttattgtcagattttgggaagatgatgtatgctccttaggttttagttcctgaactgtaaagtgaagaagaccaactggatcatttccagggtcctgtccagcctgagtcctcatatgtgggcctcgtttgcctaatgacaatagctaccagtatatttctggagtgttcactcatgcaaggtttatctattcatcatgacaccttgcagtgtagggggattatcccaccattcacataaggaaatctggaggagaagagaggaagtgcgtaagtttacgtgctcagtcaaaaataggattgggatttaaagtcagatttacctgactctaaatctcccttcgctatgctccactgccccaaatttaggatgagaaatgaaaggggtggggggcactgtaatgaggtgaccttgtaaatcattccagaccgactttgtccccacccacaccttgctcagaagaatcatctctaacctccagcctctgcttccatcactgctggggacaggaagcttatcctcttcacacagcacaattttaggccagttctaattattaaatggttcttcttaaaatttcttctcttatattttcagcttccaggccttggttctgctccctggggccgcttcttggtgaaatattctccctgccaatgagcaggttttgactttcacggagagtcagaatgtgagatggctttagctatgccaggatttctaggttatttttaaccgaggggtttgggcttgaatcagatcttttttgaaactcagtgtttccattggttctgcaagaggctccctggcacatacggtagcctaagtttctcagtttctcgttctctgcagaaaaaaattgtccattgtgccagtgttaaggttcctagctggatatattgagacccatagtctctggaccaagtttccctttgaaagtggtacatgcacggagggcccatggtgttttgtcataatcatgccttttttcttgctaagtgacattgaggtatgattttgtgctcgagaaagcaccggggcatcccataccttcctgtaccacgtgtgctctgagcttggtttcctgtgttagttcctgtgtgtttctagtgtgtttgagtttgctctgttagggggcagggtgttggcagctgaggcacacttcaaaacaagtgtggagctgagccgggagagaagaagtggcgtgaacatccccagggacgaatacccaggaggaactgaacgatgcttgtgctgaactgcagacagaactcaagcatgccattaaaatgcttcccctcccccaagagtgatgcccaccgcctccagataaaagctgggaggtacacattcatttgcaagcatcaattgaatttatgttaaaatttaaaagtctggcatatgaaatgatatgagaagaaaggtgctttatggtttccaaaaaatgtgatatttacttctgtgaaaatgctcagggtccaggtggtttgacatttctttattgttcctttcagtctatgcccaggctggcccacaggggccctggtggagccctttccctccccctcacttcctcttcttgttttctgctcttgtctctcttttctaagctgctgaacctcgaatgttttgagaagtcccattttattccacattccctgttatttactctgtagcacccacaggcaaatgaatttctcttgctgatattgatctcttcttatagcatcatggagatacattgttattctggaaacattgtccctgaagtttccaaggctgaaggtggggagagacagagtgtctcctcctgccacacacacctatattactccagaataaaggataggagagcaagatagaagggatgaagaacaggccaaaatgaggaagttcagagaagatatgattcctaagagaagacctcaaagtccgcttagaaaccagagcttgcaccagcctgggcaacagagcaagacgacttatctacaaaaaataaaatgaaatagttgtgcacagtgctgtgtgtctgtagtcctagctacttgggaggctgaggtgggaggattgcttgagcccaagagtttgaggctacagtgagctctgatcatgccactgcactctagctttggtgacaagagagaccctgcatcttaaaaaaaaaatgtaaccagagcttgtggatcagagactggatcatagagggacagaatataataccctctgtgtctgtcccaggctgggaccatgccttccacaggcttcggctagagaacttctgaagaactacattagacctggctccatataggggttctggtcatggatgacactaatccttcaattctttcaacttgaccaagtccatttttcttggctttgtttttttgttttttgtttgtttgtttgtttgtttgtttttgagacagagtctcactctgtcaccaggctggagtgcagtggcacgatctcagctctctgtagcctctgcctccttggttcaagggattctcccgccttagcctcccgactagctgggactacaggagcgcaccaccgcgcctggctaatttttgtatttttagtagagatggggttttaccgtgttggccaggatggtctccatctcctgaccttgtgatccacctgcctcgtcctcccgaagtgctggaattacaggcgtgagccacggcgcccagccctcttggttccttttgaaagccctgtaacaagttctctgaagtcactcttctcatacctttagagtctttgctttttacttcatataaaaggcaggggtttgggcactggatccttcacttatgtccacatttaccccagtaaatttccatttcctacaactgccttctctttttgcagggatcacagaaattgcttacattttctaaacccagcctttccatctgagcccttaggacaaacctattttcaacttcaagttgctcatctctctttctacaaggtttctcctttcttctccccatgttgcttcaacaagtgaacgtccttccaccttagtcgggagagcggggcaagaggagttctgatctgtatactgttgtcttgactgtattacattctgtcttttccttcaaacttcttctgtttaacttgctgcaattcacacttactgcattatagaagtccccttgccactttcttttaagtagtttagactccacttatatttggtcaataatgttttaattagaaaatataaaaatcggccgggcgcggtggctcacacctgtaatcccagcactttgggaggccgaggcgggtggatcatgaggtcaggagatcgagaccatcctggctaacaaggtgaaaccccgtctctactaaaaatacaaaaaattagccgggcgcggtggcgggcgcctgtagtcccagctactcgggagactgaggcgggagaatggcgtgaacccgggaggcggagcttgcagtgagccgagattgcgccactgcagtccgcagtccggcctgggggacagagcgagactccgtctcaaaaaaaaaaaaaaaaaaatcatccataatccccaccactggagacagtagtggtgagcacagcagatagcagataaacattttttcacttttagtctttatctacctgtgtacatttaatatttatgtggttcctacaattttgtgttctttttctcttaatgttattttgaaatctcttggatgtcaagaaaatcttgttattacaatatcttctggcctttctcttttctcactctctagaacctctaagagatataatatatgcaatatatttagtatatattatataacatactcattatatattatattatataaaatatgatatatttagcatatataacatgtgtatatatttatatgttctacgtatatagcatatatcatacatatgttacaatatatgtataacacatgtaatatattaagtatgtgtatatgtatatggtatatattataacatatagggtatatattttatatgttatatatgtctatgtatatatatcatataatatatgtaatctatatatgtcagtgtatactgtatattttatataatatatacatattattatacattactataatatataacatataatatattatatattatattatgtattatatattatgattatgtatttatgatttatattatttatttgcacatttatattataatatataacatatatgttataatatactatataatatataatatacattatataaatatacatgttacatatataacatatgtatacatatatagtaacatatatacagataataacatacataatataacatgttacatatcatatattttattacctaatatatactacatacatttatatactacatacatttatatactacatatatacatttatatacatttatatatacatttacatacattcatatatacatttatatactactacatttatatactacatacatacatacatataattatacactacatacatttattacataatatatactacatacatttatatccatatacatatcacatgtattatataacatataacattacacatattacttatatagcccataacatataacatatattagatccctatattatataacatataatattatatgtattgtatgatccctacaagaacgctgcagtgagctctgatggtaccacttcactccagcctgggtgtccaagagagaacctgtacctaaaaaaaaaaaaaagtaaccagagcttgtggatcagagactcgatcacagagggacagagtataatactttctgtatctgctccaggctgggaccatgcctttcccaggcttctgctagaggaatttggaagaactacattagatccgttagaagctctgaggcaagggcattgcataagcagaaagagagtgacatctcagtttgttgtttaaacagtaactgtggctaagtgaagtgtgtttgacacaaacatggtgctccttaaatgcttaatgaatgaatgagcacatgaatgaaggaatacatatatagtattgtgtgtatcacatataatatatgtaatgtattatgtatatgtatatatacatgctaaatataaaagatgttctttttaactgtgggattttctttttcatgtgtcattctgcagatgaacagaaataaaaaattatttaaaaaggaaatccacaagtataaatgtagtctgatgatctattttatatttttaaaactactaagacgatgttcccgactcttactttggcagctgtggtaagctcttaggctgtctctggcaagatgttccactcagtgtcccctgcagggtgatgccatttgactttggacaagtcctttactctttgaatccagtgatgttgactgtgggtagggaatgctgatatggtaatactgatcctggtatagtgagggctgggtgaatagccctaaggaagaaaataagtaggccaggcgcggtggctcatgcctgtaatcccagcactttgggaggccaaggcaggtggatcacgaggtcaggagatcgagaccagcccagccaacatagtgaaaccctgtctctattaaaaatacaaaaaaattagccgggcatggtggcacgcacctgtagacccagcttcttgggaggctgaggcaggagaatggcttgaacctgggaggcagaggttgcagtgagctgagctcacgcctttgcactccagcctgggtgacaaagagagactctgtctcaaaaataaaataaaataaaataaaataaaataaaataaaataaaataaaataaaataaaaagaaaagaagtaagtataggaaggatccaacaaatgcagtccttaataatttcccagcacaacatacagtcaagcttgggaagagatgttcttcaccctgtgctgaagccagaattgcttcctctacagatttatgtaaacttggctgttgaaatatgtatcagaaaataaactcatttctttataggttattattattaatacacatttactgaaagccatgtatttggagaatattgtgcttcaggaaacacacaaaaacctaaattacaccatatatgctaagcagcagataagtattataaacaatcctagaaccctaaactgggtgtcaggagacttgagttttagctctggctctgaaaataagagagctaccttaacactttctgctaaggggtaagtttacggattgatttccagattttttcctatttaagttgttgtcattattaactagcacttattgactattgattatgtgccaggaatcatgctgggtgctttgaatgaattatttgtttgataatgttaacatcatgaagaagaacttttttatcaactttattgaggtatagttgacaaatagaaattgtacatatgtaaggtatacaacttgatgttttgatatatatatattgtgaaatgattaccacagtcaaggtagttaacatgttcatcacctcacagttaccatttttaattgtgttgagaacatttaagatctactattttcacaaatttcaaatacataatacgatattgttaactatagtcaatctgctgtactttagatctacagaacatattcgtcctgcataatcgagactttgtaccctttgaccaaccgctttcccacacctctttgcttctatgagtttgactcttctagattccacctatgagtgagatcatgtcatatttttcatcctctgtctggaatatttcacttaacataatgtcctccaagttcatccatgttgtcaaaaatggtagtcttattatccctacctgagagatgggggaattcgggtttagaaaagttatgtaacttgcttggtgtcccatagctaatgaatattggttcaagggctgaaatttgggtctccctgcctgcagatctcaggaggccgaccctttattgctgtcattagaatggcagccagaagaaggaagtccagccgaaggctgaagctgtgcgggaatgcaagcttgatggaggaggtgcaggtaggagatgcatcctgaggaagggcaggacttagatttgcagataggaggataacttctgaggcaagggcattgcataagcagaaagagagtgacatcttggtttgttgcttaaatagcaactctatggctaagtgaaatgtatttgacacaaatgtggtgttcctggaatgcttgatgaatacatgagcccatgagtgaaggaagtggtaggtggaaaggcatgtatgggccataacacattaaccttggacctaggcagatgcagccaacacattctcactactgcattagacaagggcatcaatggagaagtgaaacagctctttcacattcagtgcaggctgagactttgttccagtcatgcagttgatatgcaattgtccatctcaggtaatgcatcagttccagtggtgtttgaatctgtattctctgttaccatgaaggcagctgtcagcctccagtatcaaatcctccttcatggcaactaaaatgaatgaggtgtgggcagtgggcacaactcagctatgggacagcccctgccttctttccaagtagccagttggaatcaatcaaaatgataagtcaagccaatgtgggtggccagtagatcgttccttgggtacaggtgtttgccaggctttggcatgtgattttggggtgcagctaggaaggttcaaaagagttttgaggtgagcagaatctaagtcagcactcctgaggatcacgggccttggagagtccagggcaaactccttccttcccaaggatgtaagtgaaactcgtctcactgccaagcctcttcagcactgtcgtttctctcaggatcctttgttacactcaggtaatgctagctaggtggtttgtgccaggtgggttccacgggaggagaacatgaatacgacatcttggccatccaggtaagtgagtggacaggtgcccttgtgtgaaacttacaatgccagtgaaattggtatagagctcctgttcgccctctgtaccatcaagatgagccacggctgaggcacagatagccgtagcaccattgtgactgccatcagcacctggcgggggagccctggttggtccttctgaagcttcttcatttaggtttaccagtcagtgaggagcagagagggagcatgaggggagtatttgagaggaacttgaccttcaaatggagacctgttatttttagtgctggatgttgaaaagaaagtctgatccttgacagggcaggctttttatatcttttatgtttctttctctaaccataaaaatctaataatacgagccaggcatggtggctcatgcctgtaatcccagcacttcgggaggccaaagtgggcagatcacctaaggtcaggagttggagaccagcctgaccaacatggagaaaccccgtctctactaaaaataaaaaatcagccgggcatggtgacacaagcctgtaatcccagctactcgggaggctgaggcaggagaatcacttgaaccagggaggtggaggttgcagtgagccgagatcacgccaatgcactctagcctgggcaacaaaagcaaaattctgtctaaaaaaaaaaaaaaaagaaagaaatctaataatacatattcatggcagaaaattaggaaatatgtagataaataaataaataaataaataaataaataaataagtggtatctacaatcccaggaccgagacataataatggttaacattttaagagtgttttctaatagtcatctataagcatatacacataggcagacacccttacacacacgtatacatttattgcatttcttaccaaatgggaatggtgctgtgtatatttttatactgctttctccatttattattaccctatgaacatttttgcatgccatgaaacattcctcaggatcaataattttaaatcactataatatatgatataaacataccataatttgtttaaccatttccatattgctgaatgcttgggaggcctccagtttttcttcgttgtaagtaatgaggcaatgatatccttgtacagtacattcatcttcacgcacatatttggtttccggaaatattattagtttcaagaatcctgtatagtgggaaatattttcatcacatctcaaacacagtttgggttctggttttaattatgggccccatcgatatggggattagtttgacactttatgagtgaaactataagcctttgcaatttgggggaaaatgctacattcgggtgaagtggttcttgaggtgaatattcaggctgatctagggttatattttctttttttggaagaaaaaggaagatggagttccacttcctcctgtctttcggctttggtctgcctcacaggaattcagcaggagactgagaggaaagagattgttcagcagtcagcagaaatccattttctctggtttcttccttccattttgctagcatcacctccaacatgattccacatctccggagcttcagccttcgcttggcgatttggtgctcatgtaaaaagatttctcatcattaggttttgatgagactggcttagttcatgaaagaaaagaagcaggtttgctttccccctgcagcctagtgtgaggccaatcagggctgtgatttattctgctaaaagaaaaatctcccaggtcagaagacgggagagaagtgccgaaatgcttcatgttcaccaggtaaaatctcagtaattcaaacttggtatcagaatgacctccctgagttcagggcatttcaaccacagcaggctcagcccagacttctgttaaccctttctgtttgaagactcagttttttcgttcagctttgcgggattttgttttaatataataattctttggtaacttcctcatatcagttttctgttctctttcttctgggtgctggacctcttaaattcatcttctttgactcttcctcttttctctttcttttcttgctttcttctctttttctctctatattttgaggcttcctcaaatacgtgcaaatatcccctatcaaattttaaaacattcactttcacatttgtgctttgcaaaagctctttcttcttctctgattccttcattcttatagtaatctcttttttttaggtcttattgcccaggctggagtgccacggtccaatctcggctcactgcaacctccgcctcctgggttcaagcaattctcctgcctcagcctcccgagtagctgagattacaggcatgtgccaccacgcctggctaattttttttaaaaatttatttatttattttttgagacgggtttcgctcttgttgcccaggctggagtgcaatggcgcgatctcggctcaccgcaacctccgcctcccaggttcaagcaattctcctgcctcagcctcccgagtagctaggattataggcatgcaccaccaagcccggctaattttgaatttttagtagagacagagtttctccatgttgaggctggtctcgaacaccagacctcaggtcatccgcccaccttggcctcccaaagtgctgggattacaggtgtgagccactgcgcccagccccagtgcctggctaattttgtatttttagcagagacgtggtttctccatgttagccaggctggtctcgaactcctgatcttgatccacacgtctaggcctcccaaagtgcttggattacaggcgtgagccactgcacccggcatagtattctatttttgtttgaagaatgcaatccggcctcaatttctctaattgtattcattataagattttgtttcatttttaagctttcttcaattttaaaaaaattatcatcatttccttctgagtcagttttctgttgatgtgtctattattcgctatcatactgtgtgttccccaattgcctggtagatctttgtgtctgatcctatgtaagaactggggacgaagaggtctgcctgagagttttgtgagcgtgatgagcctactatataatcaggctgcaacttagtataagtgggtgagaatctggggttttgcagatgttagaaaaagttatactctggatagccaatatttgctttaactgtccttatcttccccaaggactagcttaatttttagagaaaaatcttgacatttttagcttggaagaaaatgcttgagtttttgttatttttcagggacatagagaaagtggtgtataggcctttaataatacccttatcgaggcccattcctcacttcttccctcttttgtgttttccagagccttctggttctaccacccaccctggccagctgctcagctgcagcctcctctgtttgtattgtgggcgtggaatcatctgctctgtttcatccgtcaatacacctccatctgcttttaatctaattttaattttttatgattatgaaatgatttaaatagacaaaaattattaggacaaccgggtacccaccacccagatttaacacatgttaacattttgccataggtactttaggttccatttactttccattgtttggaaatgggttcaactctttccactaccgatgttccttatcctgtttctttctccattatgtgcttgtgattcgaaaagaaataactgcattactattaggttttaagagagatgagaagcagagatatgtacttagtttgccatcttaaactggtagcctagccagatctttactgtaataatttaaaagactttgatctagcctggtatttgtcagtttactttcaataggaacttggcggaatagaaagtaatcagatttcactgcaaatactgaagttttgtttttcctttcagccattcaacctattatgttaagttcctactatgtgctcagcacttaaataaaatctttgggggaaatacaaaagaagctaaaaatacggtttttgccaaagagttaggaagacaaaattaatggacatgctgatctttaaaggttagatatgtaacttccagctgtgtgatgctttaaagtttataaattgctttgccaaggctcctcatttgatctctaaaacaactaagtgagtgaggcatggatcatgttatgagtctattttagagagaaaagaaattagtgttgagcataggcagagggaaggctgtatgatgaggctgtccttggcctggaatttgatgtgtatgcagtgtccaggtgatggagaattggagggtgtccccaactgctatctttttcactgcctcataatgaatttcctttcttagcatgaaaagaaaagaggcagggcaggtgactcatgtctgtaatcccagcactttgggagactgaggagggcagatcacttgagcctaggagttcaagaccatccttggcaacacagtgagacctcacctctatataaattacacaacttaactgggcatggtggcacatgcctatagttccagctgcttgggagactgaggtggaaggatcagttgagcccaggctcacagcactgcactccagcttgggcaacagagcaaaatcctgtctcaaaaaacagaaagaaagagaagaaagagagaaagaaagaaagaaagaaagaaagaaagaaagaaagaaagaaagaaagaaagaaagaaagaaagaaagaaggaaagaaaagaaaagaaaagaaaaaaaggagggagaaagggagggaggcagaaagagagagaaagaaagagaggagaaagaaagaaagaagaaaaagaaagagaaagaaaagagagaaagaaagaaaagagagagaaagaaagaggaaagaaagaaggagaaagatgactgaggtttcaagagaaaatggactctacaaggttacaaatggaaaattattagaactaaaatcatcctttctttctttcccaattaagcaattttttatttaaaaagttgtaaaaggctatagttttactacaagggcctttccatcacacaagcaacagctaatcacattgaaatcctgactgggctttcaatgtggactaaacatatagcatggaataggtacagaatagaatgccagaatttagggattttgtggactcttttttactaaagtattcttagttaatgaaacagggccttttttttctaattataaagaaataaaaaagcaatacattgtcatcgtaaaagatttagacaacatgaaacacagtaaaaaagcaaataataatcatcgctcatcaagggctattacttccagcaatgacggttgaggtcatttggatcaattctctgtctgaacatctacagaagaaaggcaaatatgaaaaaaaaaaatccttatgaaaccattgcagaattaacaagacagtgaagaattaccaggccaaggtccatggggaagacagaaattcagaagtgagatcgccaggcagggcagttttctcctggaagcactactgattctatgtgttgctggaagatgagaggtaagtcagacttcagacagctttgctgagctagaggaataagaattggagtctaggacttgctaacagtagaaacattgatgaatcacctggagttggattgggaccttcaatgactgcccttcaggagtaaagatgaaccagaaataatctagccctcagtctcacatcatctcggtggcccaatcatgacagaaaagatgagaaaaccatgattaataaggatgacctaattgacatttatgagaaatttcatctaagaaccactgactgaacattcattttttttctttttttttttattatactttaagttctagggtacttgtgcacaacgtgcaggtttgttacatatgtatacatgtgccatgttggtgtgctgcacccgctaacttgtcatttacattaggtgtatctcctaatactatccctcctccctccctccaccccacgacaggccccggtgtgtgatgttccccaccctgtgtccaggtgttctcattgttcaattcccacctatgagtgagaacatgcggtgtttggttttctgtccttgcgatagtttgctgagaatgatggtttccagctttatccatgtccctacaaagggcatgaactcatccttttttatggctgcatagtattgcatggtgattgcacattcattttaagatcacatggcacatttacaaactaaaaagaaaatttaaaaataaaaccacgttgaaaatgtatcactgacatctttttacatcagttacagagtttatggtgcatttttcttttatttattttttgtttttccttttactgtgacccctttttggtgaatatggtgcatttttaaatataaaggtccactaagtagtcaggagtgtcataaagtaggtgttaaagtggctcagtcttttgctgtttaaaaacacgttttttatttgcatggcacgttgtgatggtgtctcatgtcaatgcattttgtcacctgctgtgattttcttcttcatttacgccatcttggcttatcataaactagtagaatgagtactttacctgcagaattctctcctgattccctctaggaacctcagtcctaaccagacctcagatagggttaaagggtgggggcagtcagggacttgggttaaggatattcccctccccagttccagaactgtagagataagtagtagaaacagagaggagggtagtcatgatttgttgaattaaacagaatttatttaaaataaatttctttattggagtagtagatgcacatgattaaaaaattaaaatgtttgaagggtttataaatataaaacactatgttttatcttttctattactaaattcttttactcagaggcaatgactttgaactctttaagctatttctactggtagctgtaaataatatgcctatgctgcaatatatatatttgtttcagttgtagacattatattttgactttggactatgataggtgaggacttatctcattcataatttcgttcccacccttaccttcttatcctcttttcttcaatttcaacattagtttttttttggcctctattctttacacttatccaatattacatatttgtttattgttccatcaattatagacagtatccctcaactctcctttccctctctgccccctagcttctgccacctttatttaaaagctttagtgccaggtgcggtggctcacgcttgtaatcccagcactttgggaggctgaggccggaggatcacgaggtcaggagttcaagaccagcctggccaacatggtgaaaccccgtctctactaaaaatacaacaaaaattagccaggtgtggtggcgcacacctgtaatcccagcttctcgggaggctgaggtaggagaattgcttgaacccagaaggcagaggttgcagtgagccaagatagtgctactgcactccaggctgggcaacagagtgagactctgtctcaggaaaaaaaaaaaaaaaaaacggtttacacagttaaagctgatttcacttatattctattctggaaacacaactgagttgtttgcattttatctatagaaaaagaagaaagttgaaaaacagtgtttacattattgtaactacgtaaacattactcactctgaaaccaggtgctataataacacttactttttgtattactttttgtttttcctgggtttcaaatggcatcttacttttctttgtaccacttgcctttcttatttctgtttttctgcccttttcacccaatcacacactgcactgatgtttttccccctcagatctttctccagggggctctgttcttgcacatcatctgaactgcttgtttcctaggtggtctggaacttcctgtcactgctttcttggattgattccactggattctacttctcattctctgtttcttggcattttctctccttttcctgtagaataacctcaagtaaaattcctaaagacgtggtttgtgggacataagctttctgagtcctctatgttggaacgtgattacatttactgtttacatttgctcactgatttggcttagttgaaaatcatgtttctttaaaaaagtttgaggatatctcataattgttttctaacttaattatgtaatctcatgattattttctgacccctattggtgttcatcaaactgatgaacaatttgatttttagtttgtttctaattcttggtgggtaagtgttttattccctttcaggcttttgaacttttacccttagtcttttaaaataatgaagcaggaggtgtggctttaataaaaatgtagggccctttccaaccttgattattgtggcattcagctctgagaaacatacttatattacttctttgataacctcagttcttctgctctttaaaaaaacttaaaaaacaattttattggccaggcacagtggctcacgcctgtaaccccagcactttgggaggccgaggcgggcggatcacgaggtcaggagatagagaccatcctggttaacacggtgaaaccccgtctgtactaaaaaaaaacaaaaaaattagccaggcgtggtggcaggcgcctgtagtcccagctactcgggaggctgaggcaggagaacggcgtgaacccgggaggcggagcttgcagtgagcccagatcgcaccactacactccagcctggaccacagagcgagactctgtctcaaaaaaaaaaaaaaatttttattaaccagttattgggcttcagggatggctccccaaggtctaatcttttctctaatattttttattctcagtttgtctatcttttttttttaaattcatttgactttgttagcaaattttctttaggggttttaactttgtttcttattttttaaatctattgttatggaaatttttgataacattatatatccatataaatgaaagagttactgcttgctaagaaagctggatagttcttcttcctcattttccttattacttctctgccaggaccattacttcagttttctgcttttaaataatttgctcacattccttctctgtctactcttcatttttgtctctctttctcctccttctcctctacctcctcctttttttttttttttttttttttttttgagacggagtctcgctctgttgcccaggctggagtgcagtggtacaatctcggctcactgcaagctccacctcccgggttcacgccattctcctgcctcagcctcctgagtagctgggactacaggtgcctgccaccacgcccagctaattttttttgtatttttagtagagacagggttttgccgtgttagccaggatggtcttgatctcctgacctcgtgatctgcccgcctcggcctcccaaaaagctgggattacaggcatgagccaccgcgcccagccctttcttcctcttttttaaagttttaagcagttgactttttaatgtagaagataagtttcttagctctctgtcttcccttcacctccaccaactatcacaccctttccatccccatctcccctgtattatttatctattgccacaaaattctacataacaaccaaccacaaaacatccagtggcataaaacaaaaatcttgtatttctctctcagttgcagggtttagatgatttatgtccagcaactctactggcgtagactaagctttctcatgtatctgggagttggctggcattggctactctagactggaggcagctggtgtgacttggcaacaggggtaatttggttctgcctctttggtcactgatctctcactaagttacccatgatacgttcccacggaaatgaaagaggcacaagaaggaatgtctatttgaagcctctgctaacatctcattggccaaagcaagagacatgattgatctcaagatcaagaggcaggttatgccatcctacccatggtggggttacatggcaactgtgaagttacagggcaaaagccatgggtaaagaaagaggtgaagaattggaaccatcattgcagctctccctctctgtacctacgtacaacaaccctatatcctagttttggttggatcgatattttctctttctctacattttgtttttttctggagtatttctttataactttttaatgacttagttcaatttctaacttttaagatattccaactttattgggaggccgaggcgggcagatcacagggtcagaagatcaagaccatcctggctaacatggtgaaatcccatctctactaaaaatacaaaaaattagccgggcgtggtggtgggcacctgtagtcccagctactcgggaggctgaggcaggagaatgctgtgaacacgggaggcggagcttgcagtaagccgagatcgtgccactgcactccaacctgggcaacagagtgagattccgtctcaaaaacatatatatatatatatatatatttcaactttacttctaagatgttggacattgcatcaaagattctagcaatttcatcttcctgaacaaatctctccaggatgtttcagatctgctccagtctggactggttgcctttcacactgacatgtggctgtcatcctgaggtccatatccgtaagaattctccgttatcctgaagagttctactttctcttttctgactttaatcctctgctttctgtagccatgtcttcctgtttctcaagtttaccccctcattttagtgatgcatattcgccaatagcttcctgagaaagggtccatgggaggtaagtttttgagaccttgaatctatgaaagggctttattctgtctttaaatttgatcgacagttgtgaaagatagaagtctaaagtttttggaaatcttcagaccagcacttcacaacatgtattactgggttctggagaacttagtatgtggtcagccctaaaacacattttgaagatagggtagtttgataaacactgcatcaaaaagagttaaactaatttctctactaagaacttggaggttttaatgtgctaatgcgtattgtgactctccaagaaggaggatgtactgcatgatgtcttcaagccttatttgatcatggaaactttcttcatcttgcctctaaagggaaaaaagttttgcagaacaaacatttagaaatggtgtaaaaggattttgaagttgggtgccctagtttatgtcctacgaagaggcaacttcttctcgccccagtgccctcctctcagctactcctaagaagccagcccttaaaatactttgattactatgggtaattttcagaatgaggatgtgtgcaggtaggaggggaatagaaaatcagtagactatgtgtccaacatagagaccagaatggaagaatttaaggttaaaaaatgtgtatagtgaaatatcttaaaatattggccttttcacagtttctggtaagggacttatctcccagtctgtctgcctccttgacttgaggatgataggcacatttaaaaaataaatctatcaaaatctgtttggggaaaacatcctctcccattctcaggccatgtggtcctgaggaggctgatctcaccctctggctcgagaatggttgtgtgacctggtctgggctgatgaaaatcagctatgcggattttgtgagaactatttgaaaaaagagacatttctttttttgtttggattgcctgtggtttggacactgcaagcctaggactgccaatggacttttctgatctctttttttggagacactgcctgaagatgtagccaacacagagggaagcagagtgaagaggaagaaattcaagagttcctggagacatcctttgaaagcccacatcagccttgcatgacctgtcagttccatatttggacttttcagttattgaggccatacattcatttttaggtttcagctagcttgaatttctgttactttctttttttttttttttttgaatttctattactttcaatttaaaaagtcattagcagagttactctgcctcccttagtgttacatgctgcaaggatgaaaggggaatgcaaatggaaatgccttttttatagttagaactcattggttgttagcttccttttccacatgggttttttttttcttttacatcaggaaagagtgtcctaaaacatggtggtctactgagaccaactaaggagaaagctaaaagtcagaaatccaggatacgaagtattcccaggagctctgtacattaaactttgggatgggaacttgatgttgagatgaaaagtggctcagtgcatgtcaggatgttgaatgggtaagcccagctccaaacagcacacatacatcaattctacacactgtttcagagaaaagtggaaccgtatatggattctggcaagttctatgagacgtgacccgcagaagaaaacagcagaaatcctctagcagagcaaggtgggccgttatttggtggtgcatgctagccacgcagctgtgcttgtctgcccctgatctgcttgtaactcacacatgttttttccctacaggccaactcaaccatggttttttggttttttgggttttttttttttttttttttgagacagagtctcgctttgtcatccaggctggagtgcagtggtgcaatctcagctcacttcaacctccgccttccaggttcaaccaattctcctgcctcagcctcctgggtagttgggactacaggcatgtgccaccatgcccggctaatttttgtatttttagtagagactgagtttcaccatgttggcaggctgatctcgaactcctgacctcaggtgatccacccgcctcagcctcccaaagtgctgggattacaggcgtgagcccccatgcctggccacccatgcgttttaagcagaatttctctggccctctttggcatgtaaaggacatcaaaggcttttcatgggtataagcacagtctggttggacagacatcctgctgtggatgctggcttttctttgccttggttaacagtttcccttctggatcaataaataccagtatcaatacgtatcaatgtacattctgaagtaccatcctgcttgtttcttgttgaggattaaagattaggaaaatatagattagtttgcagattagggcagcttagctgtacacctagaatggttgggtgtcctttgcctactatttcctctagcccaacacacaagtccacacacacacacacacacacacacacatatgtacatgcattcatgcatattcacacacacatgctcatgcatccacatacgtttatgcatatttacccatgcatgctcatggatgcaccagtgtccttcatgttccagactcaaatacgtagacagtctagtgacagccggcaattcctgccttactgaaaactatctaggatggggagtggggaactgggtggggagtttatcaaggtcttttctgcagtctccctcattgtgtggaaagactgagcttagtgcctggaaagaaacaaactgcaagaactttcgttgcatctccagaagacagcctgcctctccctggggtagtatgtgctgtgttgacttttggctcattctctgtgaaggaattgtttatactgagaagtaaatatgggaggacaagcagagaggaggagagtgtgtatttttgtgtggggggtggggttcagtcagagcttgcctgcagttctggaagcatttgtgacatcagcattgggcactgggaagcatcttaggctggcaggagtgtcctgagctctgttggtctcctgggatgccacgacacatctttcccaggagcaaagcacttcagcacatccctgtgctttgcagagctctgagttccaatgtcacattgcctccttgacttttacattgcaggcctcagtacagatgacctcttcagagaggcctaccttggtcaggcctctggacaagtaaagcgatcacctcttgaatcatcctccaactccaccccattaactcccttccagtggctatcagtgcctgaaaatatcttagttgcttgtttatgttctctactttcccatgctagaatgtaagctccctgagctccagggatctgccttatttcccccttgtctccatcacattgaacagttggcaatgtgtcataggtgcttggtaaatacagtatttgctgatccactgacccactgcatagattttctgaggactgagaaagagcagttaatcaacttaattctctgagttaaggatgtgagatacaagaataacaaactgtcattaatgtcttcaaaaaatgcattgcacattcccttacaagtgtgatgattaacattatatgtcaacttggtgagggtatggtgcccagttgtttagttaaacaccggtctaactgttgctgtggaggtatcatttagctgtgattaacatttgaattagtagactttgagatagcccttcaaaatgtgggtgggcctcatgcaatcaatttgccttaagagcaaagattgaggtttcctgaagaagaaggaattctcctcaagatggcagcataaaaatcctgcctgacagagcttgcagtgagccgggatagcaccattgcactccagcctgggcgacagagcgagactccacttcaaaaaaaaaaaaaaatcctgcctgagtttccagcttgctgtcctgcagatttcagactcaagagtataacagttcatacctgaatttccagcctgttggcctgccctgtggatttcaaaattgctactccccataattgtgtaaattttgtgagccaattccttaaaatctctctctctataaatatgtactacatatacatacctataggcatatgcttaatgctttaacttattatttcatttaatcattacgacaaccttatgaataggcattgtttctatacttactatataatatgaaaaccaagtttcagagaggttaagtaacgtagccaatatcacacagctggcaaatcatggagtttgtgctccagcccgagtctgtccaatgcacaagcatatgcttttatcatcatgcaactctaaaactggaacatgaatcagaaatggctcttgcctttgaagggcttgtggtgtattacagggaagtatagacagaaataattgcaattttcagggcagagattgataagttttatgaaatttaacaggagagaaagatcagtttagcttctgtggatggtgcagagcttaatggataatagtttcaatctgggctttgaagaatggataggaaggacttgaatacttggagctagaaaggatgtcattgtagatctgtactgtgaagtagaaatagagtgtgagccacacattagagccacatatagaattttaaaatttctggtggctgaatgaaaaaggaaacaggcaaaatccaattaataatatgctttacctagcccaacatatctaaaacactaccatttcaacgtgtaatccacataaaattgttaatgaggcattttcacgtactttttgcaccaaatcttcaagatggtagaacacttctcagtttagcatgttctcaatagaaaaaagttatcaatgagctattttgattgtttcttttctaatacatctttggaatcttgtgtgtattttcccttaacagcacatctcaattcggactagacgcacttcaaatgctcagtagctccgtgtaactcgtggctaccacattggacagcaaagctgtagatagagagcagggcagggcagagaccaagtgacagggaggctaggtgcaggtgcaggacttggagaagcatggtcagcctggagtggaaaggcaggtggggctggataacggagagcctcaataaagttttgagattttagtaacaggtaaagaggagccaccacaggttatgtgaagagggaagaaagctctgtcttaggaagacattagcatgaggggcgagtgggtcatggaatggctaatggggagagagaccagctggagagcactggcagtggttcccttggagataatgagtctgaactgaggctgtgatgctggggatagacagagtggaaaatgccactggataagagtttgcaagcactggtaaaggagagggagccacaaggatattaagaggggattctgagctttccatactgggtgactaggaatacagtgtgaaacaggcagctctagagaattaccaacagattacaagaggtttcatcttctctcactatgggatttgaaacagtctccaggacctcttccctcctccttgctggggaaagatgtctggttctcagcccctctccagcaggaagacgggtgattgcactatcaagccctcaagaacgaccctgcttcagcagagctccatccatccctcatcttgttagaactacgtgaccctgagcatctactgaatgtctctaggtcttggaatccccagaagcaccactccccaagtggtgtggttagatagcaactggatcctgctgtccaatatgcgtctaatgatctgttattacgtgctcagtgcgtctctaactgctctaatgagctggaagtctggaggaggaatgacaaagatttacagcttttccttgggaaaccgtcctcatgtcatgggagggattaactggaccaggcatgactcccagctcagtggctgctgatagcaacagggaccataagaatcttgggtgattagagccctatgttatcatggacgccttcctcgtcgttgtttattttagattgtggccatcccggcagccggcttggtgtgtgtcagacatacttaatagagagataatttaggacaaagaatgtgtgagatggttctgggggagatggagagtgagggggtagagtcgttcccaggtttgattgctgcatactttgttatctagggaagagctcctggggacttcttggatacatctccacttctacagccccgcttcccttaatcttctcacagccctttagttacttttggagtcttgttcttcaggtctcagtgttgctgccttgaatggttcatctttaacttcaggttgcatccttttctttttcaaggttcttattctttccctccttttttctgttcttctagttctctgttccacttccttcttttctggaattttttgtcttctcttcccatttatttgctgaagtagtacatggtgagtgaggctcttcgtggaaccgccaccatttttatttacctcacgttgtgccttgcatgttctcttaccttttctatttgctccgtccctataaacttataaagccttttcttcacttttttcttcctcattgtcctttgatcccctcctccccccaaaaactcaacctggaagagtccctggtgcaaggaaatttataaatagatcatcaccaaaaaaccccaaaactgtccttgttgaaggtgaaaaagaccttcaataggatccagaccataagactataggggttagcacagctcactagaaaacatgacatattaaaccaatatttttgtgtgttttttaatctagatagtcagaaatgaatcaattccaaagtctgtaagactcaaaattagaagtggaagaaaataaagcctatgatttggattctctcattgacattagccctgtcacaatgccaaggagtttcaatagttctctaggggactgtttatcaaaaccacagaaattgtccacacaagagcacagaaaactctgctctggatctgctcctatcaagtccgctgaatacatctctgtcttagcattttctgcaaacacaagggggaacactaatagcccaactcccttcttaataatccaatttggatcaattgaccaaatcattattcaaagccttctttggcctattaatacttgatttgtataggctcctaggataatgagttccatatggcatggggtgactctgtccactctgttatttttagaggagttcgaacttgtgctatgccagttgggcaggtgtcttttgacctctaagtgtcctccagggacaaccgcccaggtgctctctgtacagtgttgttccctccaatatcccttgtcatgagaggaagctgccccagccaagcaggaaggagcattttttttttctcgattgattgcaaagctgaacagaatcctggagctgagtttcccatcattgttgcttcatggtactttgcatagagactacactcatctgcctttaggggagcacaaaagggtactgggatttgcacccagacctcttgtttttagtctctgtgctgttctttactggccataggaccttaagcgagtcattgaatcctcctcagccttagtttctcatgtgcaaaatgggtgtataacacctgcctaaattacttctcaaagtatttgtgagcagtgaatgagatgagggagtgttttgaaatggtaatgtgctacataaaagccttgttattattattaatgtcatcctttggttaggcgtttgttggatcctttttctgcaggagcatggcataagatctctcttgcttctctcttcttggccactccctggccttcctctttgtctccccaccattggaaaactctttttaagtgtgggctggagtagcccctgaggctgattattttattctagagtgggggcatttctaaccctgccttaatcacctttgaacactgaaggttagaccaacactgtgaagatagatcttgcaggctgggaaaaactcaaaccacaaagggtgaggctcatttccaagggcagattttcagaggagcctagaaataaaagctggttggggatatctgctcaaacggagatgtggtaactgtgtcagagaaaactgggcccatggtactgtttctcattccagtgggcattaaattcttgacacatgctttctctttttcttgaaatgccattcctttttggttatactttttatttttttatttttactattattttttttaatttattttgagatgcagttttgctcttgttgcccaggctggagtgcactggcgtgatctcggctcatcacaacctctgcctcccaggttcaagcggttctcctgcctcagccacccaagtagctggggttctaggcatgcaccaccatgcccggctgattttgtatttttagtagagacggggtttctccatgttggtcaggctggtcttgaactcccgacctcatgtgatctgcctgccttggccttccaaagtgctgggattagaggtgtgagccaccatgcccagccttggttataggtttttaaaaatattttgtatgctttatgagaattagcttttagtcctgactacaacctttcaagggtgatattattgtgtcttccattttgcagatgaggaaactgaggtgctgagatgaggcaacttcccaatgccacctggtgatggaattggtattccaacacattttggtctaattctacagtccacgtggttatccacgaaggggaagtcacccatgaggggaactgcgagagtcaccgtgagacttcccagtgcttcacatgctcctgacctcaagaatggctcctaaattgcaaaagaaataaccaaaggaatattgcaactggggaaaatccatgctcatgctgcaaggccatccacatgctaaaaacattgaggaatttccccaacataggatctgacaagatcagagaatctcaggaagcaaaggacagcttgaccacacctccataccaccccagagtgctggctgggggtttagtcagcaggggctacagaagccacgttggtgactgggtgaatggggtaggatggggttctttcatggtgcccctctttttctccttaagcattgctctttcaaacggttgggacctagaagccagctacagaaggtggcaaaccttctctcctattctgcttgcactttgtccagcagaaattccttgcatttggacatggtcatctttccagtgcccgaccctgggaagccacagtgttttcactgtgtgtttatgttttcgaggcatttccatgggcctctgagggacataggtgaaagttcatcgtcattttgtcatcgtgcccaggagaccaagacttcattctttggaacagagatatttctatagattcttcttctctctctcctcttcttcctcttctttcccttctttttcatcttctccttctcttctttctcctctttctcctcctcttattcctctttttctcctccttctgttcctcctccttctccatctttaagctaatattcattttataaaagctattgattttcacatattaaaaagtcaggtagagcttgaaggctttttaagaaaaatagcagttccttcacctaccctttcccctactccccagaaacaaaatatttcccgtcttttctaaaataaatatatgcttacattgcctttccttgacttgctaatttagaagttatctactgagacaatattacagtggctctgataattgagatctttcacacccatctactcttgcccttcaccacaccccaacctacatacatgcctattctcttcctaacaaaaccttattacaccttttagtgaaatcattattcacaattccgtggccatgtaaatattgctactactgagctaaatattgtactttcctggtagtatacattttttccttttaaaacttttgctttcctggaatttagtaagcctttagaaaatttgtttatcccagcactttgggagcccgagctgggtgacttatgtgaggtcaggagtttgagaccagcatggccaacatggggaaaccttgtctctactacaaatacaaaaattagccaggcatggtggcacatgcccataatcccagctactcgggaggccgaggcaggagaattgcttgaacctaggggtcgtaggctgcagtgagccgagatcgtgccattgcactccagcctgggcaacagagtgagactctgtctcaaaaaaaaataaataaataaaatttgtttgacgtgtatcacctaatcccatcgctcctgttttttccttgcggtcctccgctctctgctccagtcagcccggtatgctctgtggctctcctgcctggggttgtcttgatattttcctttgtgaccactctgggatttccttgtgctgctctcctgtgttagagcctttttcgtgtacccccagtcacccccttttcttgaggtatgcactcactttcatggagaacatcctccagtagcttccttgaaaaatgacacatggcaggtatatttctggattctttccatgtcaggaaattgtctttatcctttcacacttgactgatggtttgacaaagtatagaattttagattggaaataattttctcttagaattttgaaggcactgctctgtttttctctactacccttgactcccggtaagcttttaaggttttctcattattttgtctcttggtttgtgtctttctccactcattgtgctggttgttttgtagattctgttgatcagaggacttgtgtcctacagttgtgggaaattttttgaatatgtatattttttgataattataccctgactgcttcctaggtttattttttcttgatctccttataggatattggcttcctgaattgaacctctagtttttggtttttttttttcaacttttccttcctattggctatttatttttggttctactctaagggagcgtttctcaacttagccatttcttctttgaatcgaaaaaatatttgactcttagattttaaactttcatattttcttattctctagttgcttcttcttcttcttctttttttttttttttttttttttttttttttttttttttgacagagtcttgccctgttgcccaggctggagtgcaatggtgtgatctcagctcactgcaacctctgcctcccgggttcaagagattctcctgcctcagactcccaagtagctgggattacaggcatgtgccacacacccagctaattttttgtatatttagaagagatggggtttcatcatgttgtccaggctggtcttgaaccccttaccttgtgatctacccacctcagcctcccaaagtgctggtatgacaggcatgagccactgaacctggcacgagttgctttttttgtttcttttgtatatcctcttattcttgtttcatggtggcaatcttatttctgcaagcgcattcattacaggttttctagtcagttttcttttgcttcctgtgttgtctctgttttctctaagtttgtgctttgttttctaaaaggaaaagatttcttgttttggcctttatctttattactggtagccttcctcaaacctggagtgatcttggcttatctatttcaacttaagaacaaagcattaaaaaatgaacggagacttctttgtggatttcactggtagacttcctcatggggccgtaggctggtgatcctgcttcctggttgggcaaatggagatttttttccttgaggctgttcagcttctctagggaaaaatcctctgtcctcttttctgatggtaaaggctcagttctttggaaacaaggagttgaaggcccccctgtaaattcaaattaattcccttgttctcaggcctgctcctcatctctgccctgtactctgcctggatcctgtatcctggtttcaggaaccttaatggttcagtttctctgaggacagccactggtatcccatagggttacgtgggtatatttgctgggttgcatggagtgggggtagggatgtgtgatctaatcactccatgaacagacgatcagtcaagcatttctagcctatccctcaccccagcttttgcttttaaaactttttgctttcctggaaattagtaagccttctaaaaatgtgtgtgacatgtatcagctaatcccatcactcctgtttttcccttgcggtcctccactctctgctccagtctgcacggtgtgttctgagctctcctgcctggggttgtcttggtattttcctttgcgaccactctgggatttccttgtgcagctctcctgtgttagagcctttttcctgaactcccagtcacccccttttcttgatgtatgtgctcattttcatggagaagctcctccagtacctttctgttccattgggcgaatcagccctttttgagttggcatcctcctctgaagacaatagaatgaagttcccactgacctgttaagtcaattgccctcccattcttttctgtcttccaaaacttacaggatcttttttttacactgaagtgttcttccctgcttattttgttcttgtaggcttatgcttttttttttttttttttaatttctttccttccattaaatgagattttcagagagggtagataaacatgtgagttcaatctgccatgtttagcaggcagccactgtagacctgtgaacagaactgtgagatgatgaaagtcagaaatgggttgagaagactgatctgcaggtggcttgttagagacgttagggagggaagtgactattggcaggggtccagcctgaaggtttccttagatcctgatgagggatgataagtgagaggtgtttgaatttgggtgggtgtatgccggatctgcaagtagggaaacaaagggaagcatcagatttgaaatggcaaccgatgtcccactgggtagatctggctctcttctctctccctgttttttaaaatatgtgctatacgggcatattttgcccatcatttctttctttctatattttgcccatcattcctttctttctatattttgcccatcatttctttctttctatatcttttatttccctacaggcccggggcaagtgtttgtttttattcagctgtgtcctaaacaaatgtttcttaatctttaagatgcataagaatcagattagaaaaatgcagattcagatttataggtctgagttggggcctgagattctgcatttccagcaaactcctgaatgatgcagaggctactggcccacatggttctggaaggaggtttgaatgctcagaaaagcctaagcgggaaaggcatttcacttagaggcatcttccagccctcactttttttttttttttttttttttggagacgaagtctcactctgtcgctccaggttggagtgcagcagtgcgatctcggctcactacaacctctgcctcctgagttcaaacgattctcctgcctcagcctctcaagtagctggggctacaggcacccaccaccacgctcggctaatttttgtatttttagtagaggtggggttcaccatgttggccaggctgatctcgaactcttgacctcaggtgatctgcccgcctcagcctcccaaaatactgggattacaggcataagccaccacgcccagccccagccctaactcttgtacctgttttcttctcatcctgtgttctcctgcaggctttggctgacttaggttggtttctttgaggtgcagcatttcctgaaatacttcttgctaagggctggtctaagaggagaggggctccctaaggacctaccacagtaacatgttgtcctgggaatgaacgatgggctgttccctacaccctgggcaccttaggaccaggcaccatttgtagaacagtctgcagcatccatagcacctctctcatctgccacgttgcttcctgcttttcctgttggtcttgctctagaccattcccagtagggaatcaactggataaatggatagaaggaaccggttgactctctttgttatagtagtttaaatcccaacattcaaaacttaggtggattacctctcggtttctttgaacacagtaaactagcagcattgaatcagagaataaagaaaacaaaagagtctgtttgctttacataaagggacagcacatgaagccaaagtgacctaacgtgaattttcagaattagcatttgctgttttcatttgcgtaatgtaattccacttttgcttattcagtggggatttcatttgtctgatgtggttttataagaagcaggagaagtgggtaaggaacaaaaggaaaaactagcttgttcttagtaacttagtttgatttgtttatagtgaaggttattaggatttttaaatgcaattatcctccctcaaaaacctgggatgaattgtgagaatttggacatgatttagcctggatcagttcagagtaaattatttctggatggtgtagtcagtgggggtgtatctagcttctgcttcctgtaggggggatgcctgtaacatcctggatctttgccttgatgttgtcaatggggtcactgcatgcaacttcaaggatgaagtcttattaggacaagtgaattgcagcaataagatcccagtttggttttatatcatgcccaacctcctgccaaaactgagacacaactaaaaaagaatatttaattgcatcaacaaaaacagcatgtgcatgttttgaagagttcaccaatgaggaattcaaatgaatctctagattatgtggctctctctctaattacttattccacagaggttagggaaaagagacccagagtgaggaaacggatgtataataattggcttacaggtttgctcactgttatttggtacaatattaacatccctttatgtttcttaagcatttgcctgactgttttctcagcagggtggttggaaaggctgatgggatcttgaagtgcctggctggacttgggagttggaagcagctataaatggggacatttgcttggctcactggctaatgagtgaaggatcgccaagagaaataacatttcagcggaatttccttaatgattggcacagttcattaagagaagaaacaaaactggagatacccttggggagaggctgggggatgggagggtcagatcatggaggtgggagtcctggctcaaaggaatgtggctttcacacaattaggtgtttgaaggaagacagagcttggacacagctgaataattttggctaattgagatttgcatgggtcaaggaccagaggtcttgctgctgttaaagcaggacgacatccgttatgggatccctggatgaacagtggcccatgtgtgcctcaggacaatggaaagtggcgtctccctgacaaagaacagctttcacgggagacacccttccacctttatcccagctggggactctccgtggtggatccgatggcctcaaacttacccaagtggactcacatctaataagtctccactgctgtccttctctaggagtgagaactaatgatgcctccatcccctgctgtcgtgtgttcgtcaagggtactatctttgtaagatgggcttctgagagtcagagaagctcccatgagggcattcaccattccatgttttggttgtaagaacggctgaccactgctttaaatgttttactacagagagtatggatttttgtctaccagtactggtgtgcaattcattcatagtcattagagatgcattgctataaagaaatatctgagactggaggccggacgcgatggctcacaccagtaatcccagcactttgggagtccgaggcgggcagatcacccgaggtcgggagtttgagaccagtctgaccaacatggtgaaaccccgtctctactaaaatacaaaaaattagccgggcatggtggcgcacgcctgtagtcccagctactcaggaggctgaggcaggagaatcgcttgaacccaggaggcggaggttgcagtgagccgacatcaccccactgcactccagtctggtgacagagcaagactccatctcaaaaaaaaaaaaagaaaagaaaagaaaagaaatatctgagactgggtaatttacaaagaaaagaggtttaatttgctcacagttctataggctttataggaagcgtggtgctggcatctgctgtggcttctagggggacctcaggaagcttacaatcctggcagaaggtgaagggggaacaggcacctcacatggcaaaagtaggagggcgggagagagagagagaggtgggggaggaactacacacctttaaaccaccagatctcctgtgaactgagtgacagctcactcatcaccaaagggatggctcaagccattcatgagggatccaccctcatgatcgaaacacctcccacaaggccccacctccaacgctgggaattacaagtcaacatgagatttggtgaaaacatatgttcaaactataccactctctctcccggggatgggaaaaacactaagatgataagtatcagtgaggccactgccagcccatgtagcaccacagtatgtgttagaaaccccttccacctggtgggtgcacacctacatcatagcttggcaaactgagtgtaggctggatttcagatactacttgcccctgtggcattcttctacagggcgcagtccacacagctgtgcacaatagccctggctaccagatctgaagtggcacaagactgtagagaggtcctacactcatcaactgttgttgatgccactgaactgcacattgttccaaccacaagtttcctttgggtcctatgaggcccagaaatctctgacacggccggagttctctgtagcatactgaagttcctctgagttctggcttcttcaatagattcatgtccaggcccctggaggagctgcatacctcgtcctctccagggcagaacccatgcacttgtttctcatgtctcgctgtcctcaaagacacccccctttctgtcttcctctatctggacactgaacctcttccattagttgagcattagaaaagacagaaagaactgccactctagatgatccccctttctaaaatccccacggcaaggaaagaaatgttggttatcaactagaaatgaaaggggaaaagacacagggaaagcgaaagcaaattaatatttcaatgcatcacctgctacctttacacccatactccaaatttcctcaaggagtggtggagggagaccttgtgctttcttgagacaaatgagcagcttgggatcttctgagttgccctggcctccttacacagagtgtgaagagctttataaatggtctgtggctcctctaaaaaggtgggaaaacacaatccttgatgacattttgtctggccttcaacaagcttactaacatcgtatgtcattttttccccttctccagattggtgaggacaattgtgtaagtgtctgaagaaccatctggggctccttcaacaactcaacaagagctgggttcctatgaggtcatggagaccaggagagcatacagtttgtatctgccattgaggagccactattcttgggcagactccttcgtgaagagcaggtggggccagaattgaatgctttcttaggacatttcaccactgctatccatccatgcaaatgtggttatatggaagttattttgtgttaaagagaagattgggagcattggaaaaggtaagacaagtaaaatctttgcttttcctgtttctttttgtgctctttaaatcattttttttttatttttattttttgatacagctctgttgcccaggctggagtgcagtgacatgattgcagctcactgcagcctcaatctcctgggctcaagtgatcctcctgcctccgtctcctgagtagctggcaccacagatgtgcaccaccatgcccatctaattttttaaaaattttttctagaggtgaggtctcactaggttgcccaggttgaccttgaactcctggacttaagggatgcaccctccttgatctgtgaaagtgctaggattacaggcatgagccactgcacctggcctcttttatttccctctgtattattctatcagttcataatttctctttctcacttttagtcttgttctccctccccgcttcttctctttggctttcttgtttctttcctcttttctccttattttgccttcccttaatatttattatttaaatttaacaaattaagttggataagctccgaccttaaatttagccaagttaaaccttttttcatatctatctaaacagagaaaaaacagtcaaaccaaaatttgaaattgctaggaaactggtacataatcctcaaatatagttttctcagtggacctcacaggtgaaaagtttcctcctctttgcattgaaactagccagtcgaggaaatgaacttgcggccatgctaacctctgaaatgaacacaagcaggaggtgtttggctggtggaagacaaggctactctgcaggaaatacctcattgccttcgtcttggatgtgagatgcagtaaaatggatgtcttatgaaaataatactaggctaaaatgtcactgtgattacacatatgtttgtaggtagattagagtcagttacggtcattaaaacattaggctagtgtagaaaattagctcagctctcgcagaatttcaggtctggcaggctggctttctgtaggtcaaagaaaatgctcagattggcacggagcctccttggctctcacgcagaaactctgtgactttgatacttagtgaaaaatgcacatctggaatgaaatcagacctcaccctttccaagcttctgctccttggtatttaattataatgactttggatgtgactcaggctaaaggctttatttttagcaaagatcagacctgctcttaatgtggaaatcaggaatgttgtttatttgtttaattagagcatgtgactctatttattttttaaatggtgaatgaacaaatctgacacgaaaccacattaaaaatattttgagctatgtatgcataaacagaagttttacaaactgctttctgtgaattgacacatttgtcctctgatattctgatgaatagtagtgttattcatgacttgggtctaactggaaattgtagattatgcaaactagaagggacctcaagcatcatcttgttcaacttttattttgacagaagaggagactgaggtttatagggctgaagttatgtgccaaaagcactcactagggatggtcaaaactggacctagaaactctgccactatctccttaccttcccattactggcctttcccaattgtgtgacacacgccattgctggttcctggaatcattttagatggtgcaagatactggattaagcaaggcatggtggctcacgcctgtaatcccagccctttgggaggccaaggcgagtgagtcacctgagataaggagttcgagaccagcctggccaacatggtgaaacccgtctctattaaaggtacaaaaaaagtagctgggcgtggtgatgtgtgcctataatcccagctactcaggaggctgagggaggagaatcacttgaacccaggaggcagaggttgcagtgagccaagatcgcaccactgtacttcagcatgggcaacaaaagcaaaactccatctcaaaaaaaaaaaaagaaaaaaaaatatatatatactggattaaatgactgaaccatatagagagacatctatttccaattctctttttctcttcctgattacattaaggacaataagtgtttgtttaaagttagtttttaatcctaatgttctcctatctttccctttaaacaacagacaacaaatcttaggctcagaatcttcatcaggaaacagtccacaaatagaatttaacagcgtttgcttgttttcagtttctatttgtgggaaatgtattcgttatttacacttaggtaacaaaatatcccaaatcttagtgacctgaaacaaccaaatgcacttgttatctcacacagtttctgtgggtgaggagttcaggaatgtcctggttaaatatttctggcccagggtctctagtgaggttgcagtcacaatatcagagggggctgcttcatctgaaggcttgcctggggccagaggatttgcttccaaaatggcgcacacacatggctcttggctttgctcctcaccatgtgggcctcaccatgggctgcttaaatctgctcaccctgcatcagctggctgctctcgagtaagtgatctaaaagagggcacaggagaagtcacaatggggcaattttggaggctagctaccacagaacataatactgtttttctcttgacagccaagtcataaaattacctttagataaatgtatttaagtattaaaagacaatctgatttaaacaaaattattaagtaaattttaatataggaggtcccaggtatcataaaagttgtgtaggtaacatgcatgtgactcttaatgaggaaacactgtgtcacactgtaatcctttgaacccagaagtacagaagaagtctgccagtgttggtcccaagctctccagtctggagagaggatgtccagttgcagattgcatgtggagaagtcccaagctcacatcaataatccctttccctctgctctgaaggaatcctcgtgtctcaggtgtgctttgtgctaccatcttgtgtactgttggtgaggacttggagttataatcttgagaccacctcagttattctttgcttcatctagcattattttctgttttccctttctttgtctgtttttcaaaaaatgtctacagctttatcttccaaccattctattaatttataatttttgcccaggcatggtggctcatgcctgtaatcccagcacgttgggaggccgagaagggcagatcacctgaggccaggagttctagaccagcctggccaacatggcaaaaccccatctctactaaaaaaaaaaaaattagctgggtgtggtagtgggcccctgtaatcccaggtgctcagaggctgaggcaggagaatcacttgaacccaggaggaggaggctgcagtgagccaagatcgtgccattgtactccagcctgggcaacaagagtgagactccatctccaaaaaaagaaaaacaaagtttataatttctaatatcatatttttaattcccaagaactcttttttattctttgaatactcctttctttaaatataggattctgtttccctgttcttacatagctcatagaagcaatctttttaacatccttctctgaggacgttaatactttctttatgaaggtgtcttctttctgcacgttgtttgtagttatttttatagtttcagtcttaaacatttgccttttatctgctctatgttaagaatgaaggactaaagaagccaatttaaaactctaagcacgtgagtgtcatttgggaaaaagatacctgagataaatgagaaggtatttaaaatacagtgtggtcattgctgtgacaggacagcacaaggtgtcatggaaagatgaatgagtttcggacttaggtggagacataaggaaggcttagtttcatgactttgtgtaggaatcagccagtcaaagcaggtgggttagggaaagagcattgcaggtacaggaaacagcatttatttattcgttcattaatctttgtgatatcaggcattgtactaggggtgtgataatgaataagacagaaacggcttctacttttttaccttcaaggggagaaaaacagatgagtaactgtgttagcttgttcttgcactgctataagtaaatacctgttactgggtaatttataaagaaaaaaaggtttaattggctcacggttccacaggctgtacaggaagcatagctggggaggcctcaggaaacttacaatcatgatggggggcaaagaggaagcaggcacgtcttacatggttagagcaggaggaagagagagaagggggaggtgctacatacttttaaacaaccagatctcgtgagaactcactatcacgagaacagcaaggcggatgatgtaaaaccataagaaatcacccccatgattcaatcaccttccaccaggcccctctttcaacaatgggattacaacgagatttgaggtggggacacaaatccaaaccatatcagtaacaaaccaattaagacacagcatgagacaattataaggaaagacctgtgttatatgcttggaattagaagtttgactggaattttcctccagagatggtgccagagaggtaaatggcacctcaggtatcttgtggccaaaacagaattttatggactagcccaggaaagctccctatcatttatcattgtaattttcaaagaaatgcattaattttcaaacacccactatgaactacatgccctgtagacatttagcactttaagaaactggcttaaaactgacttttggaacaaagcactcttaaagttttggcactgcctatacttttgtgaatggcaaaacacagagttaaattagtaacagattttctcttgttggagatggtctctcccttgaaagcctttgatctttccagcattgatgctgagttcaatatgtttttagcactatggctttgagtgtatgtacatttgtgtgtgtgtgtgtgtcttttttctgtgtaaaatgagtggaatggttctttcccgctcatctggaatagcaatgtacctgccccatctggaatatgatcagaaacacttcagttatacacactcctatagaacccaaaagggcaatgaattattgtgggggaaaattaacgaagtaagagttgagaaatggtttttcattctagctttgtcagcaattaggtgagtgcccttttcactttctctgctggtggtttttctcatttgtgaagggggtcaatcatacatgacctgctcacttcccacatgcacagagaggatcaaaggacgcaataagtgaagagtcaaaaggttgacttaaatgtgaggcattttcctggtgatgcctacatcatggaaatggagattctggcagtggagtgcagtctttactccaccctggactatgggttaggacagcagaagtaggctgctgcaaagcaggctcagcatggactccagggtgattgggggaagctcctgagctccattcttgctgtcctggccctggcctatcaggggcacaggcctatggcctgcctcggagaagccctgggctgcctgcttgacaggctgtcctccttcctcaggtggagtggattgctaatagcatgctgtagagaaggtacagttctcagtgtgtgctcagatcagacgagtcagtgtcacctgtgtcttagtctgtttgggctgctataacacattaccttagattgggtactttacaaacaagagatttgttgcttacagtcctggaggctgggaagttcaaggtaagacaccagcagattcagtgcctggtgatggtctgttcctcacagatggcacctcctgtgccctcacataaaggacgggcaaaggggcttcatcaagtcaaaccctttctataggggcactaatctcattcacgaaggcagaattttgacccgatcacacccaaaggccctacctcttaatactgccaccgtgggggttagagttcaacttatgaatttctgggtacacatacattcagattatagcacctggaaacttgttagaaacgcagtctgaaactccaccccagaactcctgaatcaggaactctaaggtgtggggcttagtgatgtgtgatcatgcagttcagggaattctgatgtttattaagggctgagcaccactgcctcagagaagaacttcacaaacctgaatgtgcactcggtgcttttattaaaactcagattctgattctgagcagtctggggtgaggcttagaaaagattctgtttctctcactgactcccaggtggtgccaacgcctctaggccacaaaccacatatgaatagcaaggccatggacgaaatagcttgaaaccaggagacctgggttccagggctagatctgccactaactccatggtggtctgcaggcagctcccttccccttccagcctccagtctctccctagctctgtacatgggagtcagagcttccctcccattcctcccagctctgatattgtagagtctaatgttatgaattatttcaggatatgtgatccctaggattcccagaaatccttgggaacctcccacagcaacagaacatgggataggatgctaaaaggaaacaggtggtaccccaaagaagtagctccccaggcttgtcagagagctagtaggggcccgtctcaccaagggcatggctaagaggccaggatgaggataggctggggaacccacatcacagcatctgtaccgatttcctccattgttcttagggccaggtttggagatgctttgctgaaatgcctttctgcaccctaagaccacaagttcccacgtggcagaatggggcctctcagaggtgccttaggattgtgggcagtgtctttgggtgaagaatccgaacatgatctcagaaaaggtccacattcaagatgaagggactctttcccatccctcagtgttcacttatgtgtgcctgtcctgttttacaggacactcacagctcctggcacctggcagcttttggggtttcctctccccgccttgcacaggttgactttatttccagatcttttcaaaactcctgtggtaacacatcaaattcccaggtgtgcgtactagttggactgttataataaaccttccaaacccacaaagctaaaccctgcatttgcagttctcattcttctttcctgaggagttatggctactgtgaggtctttctcacttcctgggaagcagtttccaagcagcgcagatgtggaggctgcagtctggcctgcagctgccctcacaataacacaactcattagtatggaacgttagtggggactccaccctcccttagtgtcaatatttgtttagaggagaaggcagggagggagaggcgaatggtgagctggagaaagtttgtctgaaaaagacatgataatggttacattccggtctaagaactgcttacatagttcattgctcagtcatggggtgagaccaaacttggcctgcaaggcccagaatggttgtcgtggacatattgcagaagcggaattaaggttttgtctcgcttttttgtgtttgttttcattattacttttatcatagagtctatttcttgaaaagaattcacaactcccccatctacagataactactatttacactttagtagtcttccacgcatttttcctttccataaacccaagaagaatgtgtatatttatatgtgataaatatttatattttactataaacaggattgcaagacacttttctttaactttctttacaaaagtatcactctattttacgtgcatctaagtatgtcgatataaacttcagcagcacaattttttttatttattatactttaagttctgggatacatgtgcagaaagtgcaggtttgttacataggtatacatgtgccatggtggtgtgctgcacctatcaacccatcatctacattaggtgtttctcctaatgctatccctcccctagccccctgtcccccaacaggccctggagtgtgatgtccccctgcctgtgtccatgtgttctcattgttcaactcccacttatgagtgagaacttgtggtgtttggttttctgttcctgtgttagtttgctgaggatggtggtttccagattcatccatgtccctgcaaaggacatgaactcatccttttttatggctgcatagtattccatggtgtatatatgccacattttctttattcagtctatcattgatgggcatttgggttggttccaagtcttcgctattgtaaatagtgctgtaataaacatacgtgagcatgtgtctttatagtagaatgatttataatcctttgggtatatacccagtaatgggattgctgggtcaaatggtatttctggttctagatccttgaggaatcgccgcactgtcttccacaatggttgaactaatttacactcccacgaacagtgtagaagcgttcctatttctccacagccttgccagcatctgttgtttcctgactttttaatgatcaccattgtaactggagtgagatggtatctcactgtggttttgatttgcatttctctaatgaccagtgaagatgagctttttttcatatgtttcttggccacataaatgtcttcttttgagaagtgtctgttcatatccttcagccacttattgatggggttgtttgtttttttcttgtaaatttgtttaagttccttctagattctggatgttagtcctttgtcagatggatagattgcaaaaattttctcccattctgtaggttgcctgttcatactgatgatagtttcttttgctgtgcagaagctctttagtttaattagatcccatttgtcaattttggcttttgttgccattcagcagtacaatttttaatggctgcatagtgttctatcatataggtatattgtagcttttaataaccatcctctgtgttttaacattcaggccgtttgctatttttctattgatgtcagctgtgtctgatgaatattcatggttatttccttagcatacatttctcagtgcagaatgggggcaaagtgcatgcacatttttcaagtccttctgaacatcttgccaaagtatatctagaaaagctattgcaatttacttttccattgactatatataaacatgtatgtttatctgtaattaagaatccttatactttttaaagtatggtcaatttaatagacaaaaatggtaccactttattgaatgtctttggttacaaataaggttaaacacttttcaatattcgttggccatttgcatttttccttctgtgaattatctatttatagccttagctcatttccgttgtttaaaaaaagactatattttttagaatggttttaggtacacaggaaaatttagtgaaaagtgcagagttcccacgttacatcacccacagagggcctcccccattaccaacactccccaccacactggtacatttgctacagtcagtgaacctacattggcacatcatcatcactcagagtccatcatttacatcccagttcacacttggtgttgtatattctatgggtcacaacaaatgtataatgacatgtatccaccactgcagcatcatacagaacagcctcattgtgcaaaaaaagtcatcggttcctacttattcattcttccttccccacaacccctggcaacaactgattttttactgtcgccatagttttcctttttcctgaatatcatgtcattgaaatcatacagtatgtgacttttttagattggctcattcacttagtaatatacatacaagtttcttccatgtcttgtcatatcttgatagctcatttctttttagcactgaatattctattgtgttggttctttttagcactgaatattccacgtatgtagttgtaccatagtttattcatccattcacctactgaaggacatcttggttgcttccaagttttggcaattatgaataaagctgctataaacattcatgtgcaggctttttttgtgtagatgtaagttttcaactcatttgtgcaaataccaaggagtgtggttgctggattatgtgccactcacttctttttcaagattggtacagtctcagtcattttgggctgctatgacgcatagctataggtggtttaaacaactaacatttatttctcacagttctggaggctgggtagtccaacatcaaggtgccaggatggtcggtttctgatgagggtcctattccaggttgcagacagccaacttctcatgtcctcacacagcagaaagaagttgagagagctcactggggtcccttttataagggcattaatctcattcatgaggaccttacccttatgatgtaattacttcctaaatgtgccacctcctaaaatcatcacattgggagttaggatttcaacatatgaattttttttggtggggggagaaagacattcagtctattgcagatatctttcttttttttattgatatataagaatgttattacatttgttgaaaaaaattcttcaacaattcttatattgatatatattcttatattgataaaaatataattgataacaattcttatattgatatataagaatgttattaaatatgttgaaaatattcttccctgttcagtgcctgcgctttaatataattaatggtgtcgtgcagtaaagagcttctttagaattttatgcaggcaaatgtgtcagtctgctatgaggcctccgtcttcaaaagccttgcttgttttaggcatgaatgctgtggcaggctctcattttttgtggcctcacatggcactgttgaaaatcatagtttagagtaaggtctgaacgggcactgttttgctctgagtgaaaggaacacatgttcctctaagaactgcattggattcttagcagatgtgtaggcatttttgtttgtttatttttagtcagaatgctggtgtcaggtatttctaaggtcaaagttccccaagttgctttccctgaagcttccttggcttcagaagtgatgagacactttagtgagtacccagattcctcgactttaatgacagtgatctcataggacacgaacaagaacatctcttaccttattcagaaggtctaacttgataccatttggtttctgagatccagctcaagtctttaatgacattgggaaaacagtcaataatttaataacctgatggagggctaagtcacttgactgactgaaaattgcttcttttatgatagtcacattatcttggtatttcatggttgcccctagtcttgccttatcccggtatttgaggctcaaagccttggagttgttcctcttcctctccctctgacctctgatacatgaccgcatcccctgatgcatcatcaagtctcatggattctttattcaaactctttctttgttttcttgtacctcttgcctcctatttcctggtaattgtccatgaggttctcattacattatgcctgggctattttaataattatctcatttgcctcctttgttccattctcttctgaaattccacccaatacaggatcctcctccttggcttcttgcctttgatgaaacaccttcagtgacttttcatttcatagatgctattgctcagcccccagggtccccatagtctggatctaatctaactccccacaaccaggatccttgacacaaaccatccttccagccagagggggcagtttgtggtccatataccctcctgccactatcctctatgttttgcttatgctatttctcctggcaaaacagatatttctaaggtccaagtccccagtcttgtttccctggactttccttagctttagaagagatgagacactttagtgggtgtccagcctagggtgtttctgtcctggagatctttagagaaattgtttcctgttgcttgacacttgcttaaaatgtccagccttgttctcttatttcccccctttttttttcttttctttgtcgtttctctccagtgacattgctggtctcagagggcaggaaagcagcctcttacttttttgaatcacagttacctttattagaaagtgttgcataatcctggatctggtttggagtctgaaaaaaataagaaaaaataaaaaataaaagataagtgttgcatagtacaagtgttcatgacaattccccttattaatgtgtaaaaaaccttgccagtgggttcctaaaaaagtaaaacaaaaaatcaccatgtgacccagcagtcccactcttaggtatatagaaaaaaaaaattgaaaataagtgttcaaaaaaaatacttttattcaaatgctcagagcaccactattcataatagccaaaggtggaaacaacccaaatgtccatcaacagatgaatggataaacaaaattgaatctatccatacagtggaatattattcagccataagaaggagtgaagcaagatggattaaagacttaaatgtaaaacccaaaaccataaaaactctagaagaaaacctaagcaataccattcaggatataggcaagggcaaagacttcatgcctaaaacacctaaagcgattaaaacaaaagccaaatcgacacatgggatctagcttctgcacagcaaaagaaactatcatcagagtgaacaggaaacctacagaatgggagaaaatttttgcaatctatccatctgacaaacggctaatatccagagtctagaaggatcttaaaccaatttccaagaaaaaaacaacctcaacaaaaagtggccaaaggttatgaacagacacttctcaaaagaagacatttatgtggccaacaaacatatgaaaaagagctcatcactggtcatcagagaaatgcaagtcaaaaccacaatgagataccgtctcactccagttacaatggccatcagtaaaaagtcaggaaacaacagatgctggagaggatgtggagaaataggaatgcttctacactgttcgtgggagtgtaaattagttcgaccattgtgaaagacagtgtggtgattctcaaggatctagaaccagaaataccatttgacccagcaatcccattactgggtatatacccaaaggattataaatcattctactataaagacacatgcacatgtatgtttattacagcactgtttacaatagcgaagacttggaatcaacccaaatgcccatcaatggtagactgaataatgaaaatgtatcatatatacaccatggaatactatgcagccataaaagaggatgagttcatgtcctttgcagggacatggatgaagctggaaaccatcattctcagcaaactaacacagaaatagaaaaccaaacaccgcacattctcactcataagtgggagttgaacaatgagaacacatggacacagggaagggaacatcacacaccagggcctgttgagcagtggggggcgaggggacagagagcattagtacagatacctaatgcatgcggggcttaaaacctagatgatgggttgataggtgcagcaaaaccccatggcacatgtacacctgtgtaacaaacctgcacgttctgcacctgtatcccagaacttaaagtaaaataaaaataagtaaataaataaataagaaggagtgaagcactttttcatgctacagtggggacgaaccttgaaaacattatgctaatgaaggaaaccagatacaaaggccccatgttatatgattccatttatatgcaatgtccaccatgggtatctgcagagagacagaaggtaggtccagggttgccaggggctgcgggttgggagtgtggaggaggaggagtgactgcttaatgagtatgggatttccttttgggtgataaaaatgttttgggactagacggaagtgatgtttgcccaacattgtgaatgtcctaaatgccactgaatcatatgctttaaaattgttaatttgatgttagctgaatttcgccttaattagaaacaaaaagatggaggtccctcctcgcctattgccacatgaagttagagaaaaagatgacaatgggcctagcactagagatatttgggagcagccctggtctcagtgtctgtttgattcttctcaacgtcctacatgaatataaagggttgaggatacaggccacagtataattcttttgctgtttgttgaatgttggcattaactgcaccctcatgcctcatttctcccccagatataatttattataaatttggaaattcctcgatgttgaatgatgaaacaacaatctctcagttgctgctcttctccgggagaaagagtaggtcaagtaggactttatcccatgtcaggtatgggcttgggtttcctgccagctgcccagcggccacactctggcccttgctggtcagagtaaccactgcaggaaacccggcaatggccctttctgcgggacggttcattgttgtgctcttccctccatcctcacaccccagccctctttcaccaccttctcctcagtacaaggaatattttaaaagacgttaagcttgaaatgattaatcaaactgcaagaaggagctcctgagagtctgggaaaacacagaagaacgacgctttctgctccattgaaatgcaaatatgctagccacagaaccctttgctggaaaacttggaatgatgtatttctgggaagccttactccctccacctttctgccgccttccctggctgaccactcgctttgggttgagtgcagttttgatgagtccgtttcaaaaagtcaaagctaaagatgttgtcagttgagtgtaagataagtattgcatagtacaagtgttcatgacaattccccttgccagtgggttcctaaaagagtaaaacaaaaaattatagaacctataatctccttatatggaagcagaaagaaaagaaagtgtatgttgctcaaccctttacaatttttatttctaaggttttttcctgagattagccaagaaacatatagagcacccagtgtgtgtcagcctctgtgataaatgataggtgcttcatgatgaatggttaaggtgtaatttctgcttttaaggaacttggctttttcctttattccagaaagaagcaatcgtttttagctacgatgattgtgcaagtcaagggttaaagtgatttcattttcctctttgatattaaagatcctcagcctccctggttctctgttttcagcacacatgtttattttcctcttatgggaaacagttctcatcccttgcagaagccgaagtagttatggagaagagatgaggtaaatagaaataactggggtgtagcaccaagtggattgatctttccagttccagagtccttgaaggactgcacgagtgggccggaggtggtgctctaggtgggttgtgtagtctcatctcacaataaattgaggatgtctcgggctctgccagggcttgccatgtgtgcacctgcataggtctgtccacaagggctccatttgatgtctgtggcagaacaaagtcccagtttttgagaaggagccttcatgaagttgggaccgaggactgcagtgcatacggctggctttccaaaccctccaagaccacagtctgcttgtttgcacaacatattgctgccgtgttcatctaaggacctgagaacaaccagagctcaggaaaagcagctctatcttcctagaaatgcctctctaaagacctcagagagacctagtagagtaagaggatcaccaagttgacaagtcagtaggtttgtctcttagaccatgccagataaatgactgcagtaggccttgcactgcataaatagttttccagctgtgttttgtgggtcctgaggggggaaccttgattttgaagaggagccagaggtggttgagctctttaccttggcctccaatagtagctcctttaaagataaatctgcccttgccttatgcatgggactattgttactgatgtgtatcagtttagctgggacacttacagtttacctctgttgtcctggaggaacaattattgacaccccttcttactctccaaagttttctggtttggacaataaattacacaatcactttagttagtgatgacctagaacagaagcctgtaggctgaatctgacttgcatgaaattccttggtcagcttagtgttttaaacaaaagtgaatgtgaatgtaaataggcaggacttgtgccctgtctttctccacagttctcaccattccaccatgtcttgtttctactgcatgcatgttggatgacagcctttgttgtcttttgaatttgaaacccttggcccacacaaaaaaagttgttgtgtggatctttttttgaccttgcctaattggcatatttaatagcagggctggctggttggaaacatggaaagtctatgggtggcaccccaaactgtaggaataacaggcgtagggtatcaccaagtgaccattttggatgagttcaaaggtctgtgcctgatgacattatttctaaacaatctttctgtatctattttgaggcccccagatttctgttattcttgtgcagtgatgagttaagcatattttaaaatttctgatgtgtcaggaatactttcagtggcaagtagtagaacaactgcaagaacagtggcttcatcagtggagatgtttaatcatctcattgaagaactagctggtggtggaaccaaggttgacatagcatagcaatgatggtagtgagctgggtcagcttctctgggtgctgtcttctcttcctcatggtcacaagatggctgcagctacactagtcattggtccagagggtggcaacccaagcagaaaagaaggggcagaggctaaggctttgtctccttaatctagatagaaagttctttcagaagcacatacaccagacttcccctccaggtcttatttttcagaaatgtgtttcatgagatgagcacctgctacaggagaagctgtggaggtgagcaggagaggcagatccctctccaatagggagagggattgccatgattggttcatcccaggcctggcagaggaggcctcttccttgagaacagaaccctttccccacatcctgaacaaaaccaggtgtttgacaacagagaaggagggtagaggtggcagtttggtgggtagagactggccaagaacaatgtctgccacacttgttacagggagagatctttttgaaaaatgctaccttactttctccagggtcctgtcactaaaatccatttttgcctaatactttatgttagcattgcaaagaaatcatcattttgataattgttattacatatttcttaaattatagatatagttttcataacacctttataaaatataggtgataaatgagattttgttcatttcaatgtggtcacccagaccttatagagtaggtgagacgtaacccagctgagtaaagatagagtgtgctggtgcaattcgatgggggtagatgtgggaacttacattgcagctagggtcctgcttgctaagcagcatgtgggagacctggattgagaatcattgtgggtgtctaataagtctcttttagttgcaaggactagaaagcacaaatcaagtcagactgaggggaaaaaaaacaggattttgttgtgtgtgtgttgcataagagcttttgtctgtctagatctacagtttgaagaatgtaatcaaaatctgcccttcttccctacttcctctgtgaagcctccattctgggcaccttgtggggtccctctgcagcttcagccttgcattttcagcattgtctggtccaggagagagaaaacctgcttcccccatgtttcagagtcctagaatggaggcttatttgacctaattggactggcttgagccaatcaaaatggccaaatggtatgaaatgactgaccagcttagtctagatctgtagttggcgaactatgccatttttgcaaataaagttttattggaacacagccatgctcatttgttgacatatagtctatagctggtttgtgctacaatggcagacttaaatagttacatcagagactgtgtggctcacaaagcctaaaatatttacttcctggctctttatacaaaagagtttgccaactggccctggtctaagtcatgtagtctacccttggagaatgggaaaggatgagatgaagtcaacttctcccagaacacgtggacgagagtggtaactgtttctccataaaattcccccaaagaacactggcctgccacaagaaggggatgaggatgagcacgtgcttgacaagtgttgttatggtatgtattaggggtggtgacttaggggtagggatcccatgtattgtggttggctaggagtttgttgggttctcttctttctgggggacctggcatgtttttaaaccattgggaagatttgctttctgaatgtgagaaagattttactgtgctgttgaattgctatttgggcattgttttgaatttgggcactgatttgggggaagtattaatatattggtgacctaaagtaggtctaaaaatgaatgaccacagaggtatgaaagacaggtggagaaggaaacatggctgcatgatacgcagataattgactgatcactgtgtcactcaatgattgatgagttgatcagtgcttacctagaggacattccttagtggcttgacacagggactatatatataaggcttggtcctcttccatattttaaatactttgcgtgaaaagagaaaagacatgcttattaaacctgttggatatgacaaatgtactaggatgtaacataaaattttataaatttcttgaccaatggaaataataggttgaaaaaagtaggataaaatttatcaagaataagtattaagtcccatgtttaggtaaaaccaaccaacaaacacgtaaactacttgtgcaatatgtgcaggataggagagctggtgtaatgcagtccatatgaaaagcacctgtgctgtttggttgatcacaaatccaacatgagtcagcagtataaaaattaaaaaaaaataatggtggggagagagtggtctttcaaaatgaggtgctgggtcattgggtaaccatatggaaaaagaagacaatcttgacctctaactcatacatacacaaaatcagttccagatttaaatgtaaaatgtaaaagctaaaacaataaagcttttaggtaacaactcaagagaacacctttatgacctcagagaaggaaaaggatttttttttaaaccagggtacaaaagatgttaatcctaaaggagaaaagataaatggaactatttaaaaagtaagaactttttaaaaagagactatacaaatggtgaaaaagcagccaatagaagaagaagttctctcaaccactctctctttttctccctttctctctctgtccactccacaaaaatctattcaccagaaaaataaaaagaagttctacaaatcattaagaaaagggcagagaacccaatggaaaaatgggcaaaagacttgatcagacactgtgtaaaagggaatatccaagtggccactcattatgagaaaaagggctcaacttcattagtgaaaaggaaaatgcaaatcgaccactattacaccacctccaccaatactgctaaaattaaaggattgacaatactaagtgttggtgagagtgtgaagaagcaacattgatagttggagtgcaatgctttgtacaatgtttcatagtattaactaaagataatcacatgcatactgaagggtggcagaatatgccacctccaaagatgccactttgacgcaagggttactctgctctacaggcacttgaagaccagcaggtgcaggaggggcgctctgacctccctttttcttcctgaaaacaggagatcgaactcccaagtgaaagatgccctctcaggcagggcgtggtggctctcgcctgtaatcccagcactttgggaggccgaggcgggtgaatcacttgaggtcaggagttcgagaccagcctggccaacatggcaaaaccccatctctactaaaaatacaaaaattagctgggcatggtggcgcgcacctgtaatcccagctactcgggaggctgagacaggagaatcgcttgaacccaggaggcaaaggttgcagtgagccgagattgtgccactgcactccagcctgggtgacagagtgagactccatctcaaaaataaacaaacaaacaatcctattaaaaaagaaaagaaaagaaagatgtcctctctttaccaggaggaaggagaggaaaatccttatccccagaggcaaggagccggcactgagaaatctgtaagggacagactttgttgaaatgactcttatcttcttttggtcgcctcctatattttagttacttttccacagttatctgtctgttcaacccagtagataagcacttaagtgttgccaattctttgggttttaattttcctatggggtcctatgtacatctaaaaaaaaaaaaatctgtctgcttttcacatgttaatcagtcttaagtcaatttcattctcaggcccagctggagaccctaagaggggagaggtaaagttttgcctccccaccaacactctatggcttagcaatttgattcctaggaatatacccaacaggaatgcacacacaggctcaccaaaagattatactagaatgtttgcagcaacattatttgtaatagtcaaaatctggaaaacccaatgcccatctataatggaatggatgcagaaactgtggaatattcacacagcagaataccgtagagcaattagattgggcaatctacaactacaagtgtgaacaagtctcacaaacgtaatgttagtgaaataagctagacacaaaactctgtatgtgtgtaaacatatctattctgcatgattccatttatataaaatacaatataggcaaaactaacataggtaaaagaagtcatgctagaagttgttcttaagaatggggaaaggccaggcacagtggttcacacctataattccagcactttgggaggccaagggaggtggatcacctgaggtcaggagttcgagaccagcctgaccaacacggagaaaccccatctctactaaaaaaaacaaaactagctgggtgtggtgacacatgcctgtaatcccagctactcgggaggctgagggaggagaatcgcttgaaccagggaagcggaggttgcggtgagccgggatggggccattgcactccagtctgggcaacaagagtgaaactccatctcaaaagaaaagaaaaagaaaaaaaaaaaagaagaagaagaagaagaaggggggatatcctcgctgggaggatttggagtaatttctacttctcaatctggtgcttattacatgagggtgttcagcttgtgaaaacaaatgaaatgcattatggcatatgcacagtccgtatgcgtacaataatttagcaggagggtacaattattgagcaaaggtaccatttaatagaaaaactaatggtactatgttcgtgtgctaggtattctaggtcatctcatcaaagccttgccacaacttcatgatgcagatattattcctgtcaatagctgagcaaaaggactcaagctatcttccaattatacataaacccaagtaccgatcctcaggctgccttgtgtatcctcttaattattcttaaagagcagaggttgcaagctcgggacccatggattccacactctagaaggtgcattttgtttcctcagggttgccccaactaagtgctttaatttttagaagttgtttgccgcggcacagtggctcacacctgtaatcccaatactttgggaggctgaggtgggcagatcacgaggtcaggagatcgagaccatcctggccaacatggtgaaaccccgtctctactaaaaatacaaaaattagctgggcgtggtggcctgtgcctgtaatcccagctactcaggagactgagccaggagaatcacttgaacccgggaggtggaggttgcagtgagctgagatcggccactgcactccagcctagtgacagagtgtgaaactccatctcaaaaaaaaaaaaaaaaaaaaagaagttggttgctacgtagtttcacacacaaatcagattttcgttatctcttgaaacattggaagatctggcaaagctggttcttttccaaggttaacaacaaatggagctgactcgcagttacttgcttcctttgcatctgctgtccagttctccacagtcctgcccctccccgctccatctcaggcggcttcactggtttatgtcccctgcctggccctgtaggcttgccatctgtgatttggagctgccaaagttgctttcagaaaatcttcttactctttacctttttgaattgaatccctgattgatggcgtagggttttctcttcccatcttttccaatgccatgagttccgccgttgttcatacttacagctcattctatggtattgatccctgttatacccagctaattttccacatacatcaatttgatatttataaaatacattattcactagtgtatgtagaaatagactgacggttgtgctgggaaggggttatcaatttcatcggtttgcgatttggataaagcagtcattggaggatccccattttctctgttttcaacaaatcctttctccctctcccattactgatgtattatgaatttaacagatatttactgaatggcaggccctgttccaggcaaagggatatagcagtgaaaagtctgtagtctttgctcactttgaacaacaatctagcaagggcagacaggaaatgtatgcatacatacttacatacatgcatacatatggtcatgtggtgagaaggtgctataaggagaattaagggccaggcacggcggctcacacctgcaatcatagcactttgggaggccaaggcaggcggatcatctgaggtcaggagttcaagaccagcctgggcaacgtggcgaaaccccatctctactaaaagtataaaaattagctggcatggtggcgggcgcctgtagtcccagctactcaggaggctgaggcaggagaatcacttgaacctgggaggcagaggttgtagtgagccaagatcgggccacttcactccagattgggtgacaagagcgagacgccatctcaaaaaaaaaagacagagcgataaggtgggtaagggatagagtgaagcagtgtgaaagagtagtgagagtggggctgatgaagtaggaactggtcagaaagaagttatgtggctggccggcaaagcaagtgtttatggcagaggtggtcgtaagtgcaaacggcctggggcagcaaaggcctcatgtgggagggacaggaagggggccagtgtggctggggcagaagcagcagggggagcagtgggaagggaggtcccagagaatagagaggcttgggaggagcagggtctaatcatgtgtggtcttgtcacaccagagcagaggctttgaaatttctgttcagtatatcgggacccacggaagggatttgattagggaaatgatgcccagtcttctgatcctcatacttggtcctttcctctttctttccatgtctggggcagaccaggaagtctttttccccatggaaggctcttaagacctaaaaggttgctgagacttagaagtactcctatatttaaaaacaactctggccgggccgcgatggctcacatctgtaatcccagcactttgggaggctgaggcggatagatcgcttgagctcaggagttagagaccagattgggcaacatagtgagacctctgtctctacaagtaatttaaaaattaaccgggtggggcatggtggcacacgcctgtgatcccaaatactaaggaggctgatgcaggagcatcactggagctcaggacttccaggctgcagtgagccatgatttgcaccattccactccagcctgggcaacagagcgagactctgtctctagtcataatattgatgatgatgatgatgatgataaaaaataaaaataaataaaaagaacaactccaatgttctcctgcagttgaaaatatgtcatttgtaaaataataacaataatttgtgaacattttgctaaacaaatacgtttttcgtcatttgtcttttttcgttgaatatataaagaatcaattctgcatcttttaaaggtgaatagtggcttagaaacacttttcctggtgagttgccaggaaaccggagaggggagatactttgaaggagtaccctgtgagtggaattttctagacagacctcaccaccagcctcattagtcaatagagattcatcttagacccttatattctctacttgtcaattttagtttacagtagtgtgagtttcctgtctttcccctgttttaaaaggtattttaatgagaaaatggaagcaattttaaactggaaggcagaagtctagttctaaagaaatttgtccctggaatgtgaactgaagaaggcctattagtatccatgatgcagttggcagttaaagagtatagagcatgaagccgctgagacaggggaaaattaggcctgggagaaaagaccataattttggagtaaggatcactatggactgaaggttaattttgacagtaatgggatatctggagcccagttaaggaaatgagactgtaactaggtttaagaggaatcagaacattaccgcgcatattttgatgaggttgctgaaagaaggccatgagaaaagagatttcaccatcaggtagtgtgtggacagctttgagctttaggtaattatccctgaacagagatgcttgtgctcctgagagagaaaatcactgtgtcagttgaaggaacaggaagttttgaagataacaaaccctctggattttgtcaatcaagccagggtgactagggtagggtacccaagtatccatgtgtaaggggtcccaactgactactgatgatttgaaacagaaacccatctttaagtcatagactgaaaataactacaaacacagtgattagataatatagccctgttgtcttgagatggtgggaatttctttcttcctctctttctttttccatctcttcaacaaatatttactgagtgtctgtgatttgacaagcactaagttgggacatgtaaacaaataattaaaataattgcagacaagtgtgataacaggggtcttaacagaatgccctgggaacatttaccacttacatttaccgtttatttatacttagtgccttgtgaatgtgtacacaaaaagtaattctttcataaaatatgaaatctagtctcctcgtaagttccttttgtgcatctgtttcaaataaaatggaaggcttagcctccttagtaaaagtccccttagtgtccagcacctgctgagtcagggaaatgggataagagttttggccaaaagcatctggttttaaaaaggcaggacctcaagctttttacagcaatgaaagaaatgacattgaccatcatgtgaggtgatattgttctatggtattgataagacaggccattccaaccaactctaaggtgacttgtcttttggattttagtggaggtaatgacccacagaaaaattcacacactggttttcttaaagagtcctacttcggccgggcgcagtggctcatgcctgtaatcccagcactttgggaggccaaggcgggctgatcatggggtcaagagatcgaaaccatcctggccaacatggtgaaaccccatctctactaaaaacacaaaaattagctcggcatggtggcgcgcggctgtagtcccagctactccggaggctgaggcaggaaaatcgcttgaacccaggatgcggggggttgcaatgagccaagatcacgccactgcactccagcctggcgacagagactccatctcaaaaaaaaaaaagtcctacttcattttgcctctggctcatgtctcttgttcataaagatagtatggtgctcttttattttttactttttccctatcccaaatgatttgtaatgtgatgtctataaaatgcagctcagacattcatatgtcttgatattagtaccaaataattcctgacaaatattgtgggaaagaagaaaggtggcaatatgtattacaaggaatgcatccacacattctctttctaaacgatccaaacaagatataagaattcaaacagaacagcgagtcagcaaactgtaatgctcacacaggacaaggcatgttgcctctcattgttctgttttattgacatttttcttggctattcttatacattgtctcttcttcatgaaccttaaaattggcttgttatactccatacaattccacagtgattcagatgagaattatttgagtttgtatgttaatttgggcaaaatttaaaatcagcacaacatgaagatttttgtccaataaatgaaatacctctccacttatttaattcttcttttatgttctttggtattattttatagttttatacatacagattattttttcttttttaaaattttactttaagttctgggatacatgtgctgaacgtgcaggtttgttacataggtatacatgtgccacggtggtttgctgtacctatcaacccatcgtgtaggttttaagccccacatgcattaggtatttgtcctaatactctcccttttctttccccccactgtctgacaggccccagtgtgtgatgttcccctccctgtgtccatttgttctcattgttcaactcccacttttgagtgagaacatgcagcgtttggttttctgttcctgtgttagtttgctggggatgacggtttccagcttcatccctgtccctgcaaaagacatgaacgcatcctttttgtggttgcatagtattccatagtgtatatgtgccacattttctttatccagtctatcattgatgggcatttgggttggttccaagtctttactattggaaatagtgctgcaataaacatacatgtgcatgtgtctttatagtagaatgatttataatcctttgggtatatacccgtaatgagattgctgggtcaaatggtatttctggttctagatccttgaggaatcgccgcactgtcttccacaatggctgaactaatttacactcccaccaacagtgtaaaagcatttctatttctccacatcctctccagcatctgttgtttcctgactttttactgatcgccattgcaactggagtgagatggtatctcgttgtggttttgatttgcatttctctaattaccaatgatgatgagctttttttcatatgtttgttggccgcataaatgtcttcttttgagaagtgcctgttgatatcctttggccacttttggctatacatgaagcagcggaagctagcattccaattttattcttttaatgggaacttaatttgatatttattgttctctgatggttatcttttatcagattaagatttttctcctagttcattaagattttttgtttttggtgacagctttattgagaactattcacataccatactatttacttatttaaaatgcacaattcaatggctttctatatagtcacagaattgtgcaacaatcatcacaatcaatttcagaacatttttattgcctcaaaaagaagccctacatcccttagctattaccccccagttctcccccttccctaggcaaccacttctttctctctccattgatttgtctatcctggacatttcatgtagtggaattatataccatgtggtcatttgtgactggctactttcactaatataatattttaaggtttatccatgttgtagcatgcatcagtacttcattactttttgtgactgaatactattccattgtataaatataccatattttgtgtattcattcatccttggacaaacatttgagtggtttctaccttttgactaccatgaataatattgccatgaacataagttttcatgtagacatatgtgttcatttctcttggatgtaggagcaaagtcacttggttatgtttaatgttttgaagactatcaggctgtttgccaaaatggctacagcattttcatacactcctaccaacagcgtatgaagtttccaatttctctaaaatctcactaacatttgttattagcagactttttgattgcagccatcctagtgaatgtgaagtagtgtttcctatggttttgatttgcaattctctaatgatgaatgatatcgagcatgttttcatgtgctgattggccatttgcatatcttctctggagaaatgtctagtcaaatctattgtccatttttcaattgggttgtctttttattattgatttgtaagagttctttccatattctaggtacaagttgcttattagttatatggtttgcaaatatctcccattctgtaggttgtctttttactttcttgatagtgtcctttaaagcatagacatttttaattttgatgaagtccgatttatctatttttttatttcttgtgtttaatgtcatatcgaaaagaccattgctaaattcaaggtcacaaagatttatctatatgtttgtgtcttattccattttgtgctgctgtaacagaatgccacagatggagtgatttgtaaagaagagaaacacattttctcacagttctggaggctgggtagtctgaaatcaaggtatcagcatttgatctggcaaagtacttcttgctgtgatttcacatggcaaaaggaagaagagcacgtggggacaagcatggtgtcctcatatgggaaagagtgaaagagagcagacccactcctgcaagccctttttacagaagcattaacccattcatgagagtggagcctccatgatctgaaagcctcccattaggcaccccttatccaatattattgcattggggattaaacttgcaacacatcaatttgagggacatattcagaccaaagcagtttgtttctgtgagttttatagttttagttctcatatttagttttagatctatttggtaccttttgtgtatactgtgaggaagaggttcaactttattattttgcatcttaatatgttctagcaccttttgttgaaggtaatattcattctccattgaatgtcttgtgctcttgtcaaaaatcaattgacttccaggtgtggtggctcacgcctgtaatcccagcactttgggaggctgagacaggctgatcacttgaggtcagcagtttgagatcagcctggccaacatgatgaaaccctgtctctactaaaaatacaaaaattagccgggtatggtggtgtgtgcctgtaatcccagctactcaggagactgaggcagaaaaatcacacaaacccatgaggcggaggttgcagtgagctgagattgtgccgctgcactccagcctgggcaacagagtgagactccatctcaaaaaaaaaaaaaaatcaattgaccacagatatgagtttatttccagagtttctcttttactccattgatttatatgtccattcttatgctggtctatgatgtcttgattgtgattgctttgttttaaaaattggaattgtgagttctccaactttgcccatctttttcaagattgttttgactgctctggatcctttaagtttccctataaaattagaatgaccttgtcaatttctgcaaagatatcagctgaaattctgaaaggaattgcattaaacctgtagatcactttggggagtactgtcattctaataatattaagtctgcaatttatgaacacacacttttttttatatagatcttgaaatttctttcaataatgttttgtagtttttaaaacataaaatttatacttcttttgttaaatatatttctaaatattttgttctttttgatgttattttcaatgaaattgctttcttaatttcatttttggtatgttaattgcaagtatgtagaaatgcagttgatttttgtataataaacttgtatcctacaacctttctgaagctattaggtcagttggtttcttaggattttctattataagaacatgttgtctgcatatagaaagtttacttcccttttccagtttggatgcttttatttcattttcttgcatagctgccctgactagaacctccagtacaatgttgaatagaaatggtgagagaggaattccttgtcttcttctgattttagggggaaggcatccagtgtttcaccatgaggtataactctagctgttgtttttttcgtagatagcctttatctggttgaggacgcttccacctacttctagtgagttaggtattattatcataaaaggatattggattttataaaatgatttttttgcatctttcgacatgtgttttttgcttttattgtattgatatgatgcaatacattgattgatatttagatgttagaccaatcttgcatgcctgttcctaggaaggggacgtggtcatggtgtataataattttttttatattatttgatttggtttgttgagaatttttgtatttatattcatagggatattgatctgcagttttattttcttgtaatgtctttgtctggctttggtattagaataatattgacttcttagagtgagctagaaagtgttttttccactccaattttttggaaatgtttgtggagaatttgattaatttttctgtaaatgtttggcagaattcaccagtgaagccatctggtcctggagttttctttatgagcattttgttttttacattgttgattcaatctctttacctgttgtaggtctactcctattttctattttttcttgagtcagttttggtagatctctactaatcatcctatttcaaattgcaaaattctccccctgataattccaatccctcctattctgttctgttttttctccaagatccttatcaccttctaacatactgtacagtttacttggttgttatctatgtatctacctaatctatagcttttttggtctgctggaataggacattcaggatctttagtactttgttaactgatgtactgatgtatcttcagtctctctctccctttttttttgagatggactcttgctctgtcaccaggctggagtggtacggtggtgcaatctcggctcactacaacctctgcttcccaggttcaagcgattctccttcctcagcccccctagcagctgggactacaggcatgtgccaccaagcccagctaatattttatatttttagtagagatggggtgtcaccaggttggccaggatggtctcaatctattgaccttgtgatccgcccacctcagcctcccaaagtgctgggattacaagcgtgagccaccatgcccagcctccaatctcttaaacagtgcctggaacctagtagtcattcaataaatattgctgagtggatgataaaattagatgatatttatcttttaatctattaaggtaatgaattttattcttatatttcttgaagttggctaatactttctttcttcggacaaagcctgacaagtcattatatattgttattctcatgctgaatttaataccaatattttctctgtaatttttgcatctgtgtttatatattatcttgattcactgtctttttcagtgtgtgccctattgatgttctgttctgatgtcaggacaattctaagtttgtagaatgagtcaggggaacttcattttttcaaaatatgcagtaagcatttatgtaacataggaattattgtttccttgaaaatgtggcagaacttgctaataaaatgatttgaatttggagggttatttaggaatatgtctttgaaaacttttaaatttcataaataatattgatctatttagtcaaatgctttctttagccagtttttgtatattacatgtttccaagaaatgagtaatttgtttagaattttaaaactttatttgcccaaagttgcatggctttcttttatgctctctaaaattgcctcatcttgttacgcctcctttttacaccccaatcatctggcataagaaacctgtgtctgcttgattctcttccttggcaggaacatttctccttcatcttctgtgttctgaagtttcactctgatagctataattgtaggcatttaaaaatttttactcaaggacttagttgtcttttttcttaatttaaatatagatattttcaaacatgaaatagaggagagaatatcataaagaatctccatatatctcagtagtgttgctgtgtcacttcttaaattagtaaaaataataaatgttaacaatatttaaataagttttctttgctttctcgttctttagactaaaattaaattagacactagaacttctagatttatgttccgtgcttcttaattttttaataatactttcatttttaaatcttttattcttaatcacttgcttgatctcacatataatttttttcacatcagctgcatgccttttgttgtttctccaatttttagtgattacacaaatatttatgagctaaatattaatttccaagaactgtatttgattattagcatggatgcagtagcttcctgactcttccaaatacatgagtaacacaaaattttctaaatatttgagtcttctgttttctcacctaaatccattttctcagatgatagttgcatgggttgagtttgttgcctctcttgtacttgttttctgaaaatgtttgggaatgactgattgtatgttcatgggtgtccctgagttgtatttttttaagaatgctgtttctgtttatggtgaacaacttctactgatggggaggagggggactggtggcttgtgtttaggaaacaggagttccctgtgtcttctagggctactgtgttttggggcactttgctgtttttctgtccctgacacttttatcactgctactttctgattagtatagaggaggcaggaaaatcgctcatatgtaactgcaaatgcaagcaccctgttggacaactcacattcttcttcggcttcttgtgacaattagttctggcctcataggctcttagaactgcttctttgcctgcagaaggctccttccagacatattctgagcactgatttcctcttttggttgttatttgtttatatatgaggatctgttttctctgctttgtatcacttaagaattactgagcatttctggtccactgattcactggtggcaccctatcttttccaacactgttaaaattttctttcctcctcctgtttttcttattcttctcttaacaggatttgggatatcataggttatattttaccctctgccgccatttgactactgcttggcttttggcaaaattgggtttttaatcactgctctagaaaatcttcacaacagttgacttctcagcagtatttgtaagcaagtggattttacatattttataatcaactttgagttattcttttatgacacttccatttttttgatgagtataatcaaggcatatcttatcatttcaatttttttaagttatagtcttcttgtaagtttactctaaaacatatatagcattcattctcaacacatgcacaatgaagacaattctcagtgttcttgggtactgggtacaattggacttttgtgaatcttagtggtgagagggatattctcataagtattaagatgctaatgcggccgggcacagtggctcacgcctgtaatcccagcactttgggaggccgaggcgggtggatcacaaggtcaggcgatcaaggccatcttggctaacgcggtaaaaccccgtatctactaaaaatacaaaaaataagccggacatgattgtggatgcctgtagtcccagctactcgggaggctgaggcaggagaatggcgtgaactcagaaggtggagcttgtagtgagccgagattgcgccactgcactccagcctgggagacaaagcaagactcctcctcaaacaaaaaaaaaaaaaaaaaagagagaaattttgccttatgggggggtatttcccgaataggaggcaccaatccccaccatatggtgatgaagccagacgtagaatttcttgatcttaaacttattaaatactcttttcactttatggagtagagctaattctatagcagttgacaaatagatacaacagggagtttaaaaattctttccaacttatttccaagtaagctcacacactcttaaattattattttccttaaccatgacccctctctgttcagtagccatttgtaacaaaacaaacaaacaaacaaatctcaaacatggcagaagaggcttctgccctggtaagtgaaaggttggtatttcagaactgggaatactctcttttaatagggggctaaggtaagcctagatgtccctacagtctgtagttttctgggattgttttcttctttgatatcgaaatgccagtagactgtctcttctaacacatagcataaggttcagtgtaactagttttgagatttcttgccgaaagtgtggaagtccacaaattcatcccgactgtcccccgcattctcacctgacctagatgcctactcacttctttgttgtcatcacttaactggtgactctggcagctttcctatccatgatgggggcatcttcccttccctaattcctcaaggcacagccaaaactgtatgtcacattaaatgaaattctatcaaatattttgtgtgtcagagactgcttgttttctctaatatccactctttccttttcattttaataacaaattcacaggttttagttggacacatgcttgggtgttaaactgtttccctgctttgcttgcagataaattctggtcaaggaaattagaacagaagtgataaagcagtacatacaatgtccagactgcatccttgaaagaaaagtaatatctcttccattggttggtatgtagatgtgatggctggtgctggagcaaccatcttggagtcaatatggaagccacgtgtgaaaaaagaacaaaaagattagaggagctcaagactccaaaattcaggagtcagcatattaaccttggactgcttaaacttgaatgaaatgaaagagaaataaatatctcagttcaagctactgagcttttgtcctttacagataaaccataaactttgagaacatgaaagagaataacagaagcaaatttaaagctgattagtagacccttggtaagacctaaaagcaagaaaaaaatgtggcctcttgactaataattttgaaaattgaagagtgtcagagttaggcatcaggaattcctaggcatttgcttatttctttctgaaatgcccccaaaaagggcttcttgacatccttctataactttgcccttattagggtcaaatataaactgttatactaggtagtaaaactgattatttataagcaaaccttctagtatttaagttcaaattgctacaatattggcattattaaaaagaaaagtttgggaactacccgaagaccatatgtataagccataaaataaaatccaccttactaattaaaagtcacacctcattttgacatatattagtatcacccaactcaatccccttcctaaatcatcaggcttagctctgaatgacctttggctatttcaaaaaatcaaatctaccctctaaggatgtagttgtaagtctatgtggaagactgagccatggttctgaaaatagtgtcaaagagaatttcagaagctgtaaaatggtaacctcactaaaggaagtatttctctttcccaaggcaagactaaaggggtctgtggagatcttaattctactttggttaccatcctgataacagtgctaaagctcacggtgatacaaatcatcttgggtctggttgcacttggaatttaggtttcagcaggtgttcaatgggcagagacatttcacgcccaacctgaataggtctgtaactctgccttagaaagcagcttgcctataaatatttcactcagagtcagacaaaagctggatggatgtgaggctgcttcagacaaaaagcagataaattcctgcttaacatgtacctgatgctttatgatttctgcctaagttcagatttcctggatcaaatgttcccaagacctgtgaggtcatgtggtttcagagacataagctaagcttggtatatattacagagaagccatcccatccgggcgcgaccactctgaaggtaagtgttaatcccaatctgatttcgtgtgtgtgcaacagctgttgggaacattaggactgccatctgtgtccaatggaatgatttcctaccacttggcctcatatggcccaaaaggtaatttagtgcatattgggaaattcctgaaacaacatgagacttaacaccattttcccatcaaatccttggagtttttgttgatgtttagagagcccacggaggtgtgaaactacgggtctggggaatggaatggtttactcataaaatctgggatctttatttgggggttctttctccaagataaattcttgtgtgtttccaagaataagttcaatgccatacttggagtaaaactgtccttgaacatgaggattaaaatcctgtgttctggtgatggtcattttctgtacccacttggtaatgcaggagtacctatcagacgtttgcagactcttcatttgcatatgaaaatctcaatgacttagatttactgtcaataattttactcatgaaaagtaaaactaaaatattcgtgaaaatcttagtgttctctgacctctcctagggtaggacccatcttccttaaattgttttctttatttttctaagttctttatcctattccatcagcataaagaaaatatctgcttaagctgatttacgttcaagtgtgagtaaaggagagataatctaagctgtaaaccacactaaagatacggatttgcattttttaaagtgatgcttggtacttaatctgaatttagcaaagctgacttgatcccaaccttcgagcagctgctgaaatacccattttttaggaagtcttttcagaatgattaggacaggataaggctgttctatcctgcctcgcattttggctttcctcctggatccagctgtcagcagttatgtcagtttgaaatataactgttatttgaaacataacgttttcaagatacaacagctaagatagtattttcatgtagaatttagtacatttgcaccccttaaaagaaggcaataattgaaacatttatttgatcacctactatgtaccagtcacatgcacctgcacgtgtctagttctttgtgtagttcttttacatgacattaaatatctattatactctagaatttggggggatagaaccactattagcctttgctagtgtctttcactttgttctaatttctcactttcctgagcactactcagctagagtcttttttttttaattttggtagtattttatttgtttatttatttatttatttgagatggagtttcactcttgttgcccaggctggagtgcagtggtgtgatctcagctcactgcaacctccacctcccgggttcaagcgattctcctgcctcagcctcccgagtaagtgggattatgggcatcacccacaacgcctggctaattttttagtagagacgagatttcaccatgttggccaggctggtctcgaactcctgacctcagatgatccacccgcctcgggctcccaaagtgctgggattacaggcgtgagccaccactcccggcttactcagctagattcttgtcttccaatgggatacacattcactgtttctgcctgattggtttcccaagtttcagatcaggtaattctgaatcaagttcactttgttggcactttcctgtgaatattattcccctaatagtatggtttatacacagaccaacttgaacctttcaaaacagaagcaacagtagcaagcttaagaggtaaggatcatgtcttactcatctctgcattctgagtctaacacagtaccaagtgtagagagctagtgaatattccgtgtcaaaaaatgtgcctcttcttcacttcaatatttatgtgcaaagggcacccacagatggggaaactccttggtatggatgaccaagtttggcattccaatgtttccaatgggataggatgaaggccatgatactaggatgattttccaagtcagaagacttttctctatttaacaaatgaaacaagtcacagcaagatcagaggcaggatatcaaagcataaagatatctttagtttctttcctaagcaagttgtgtgtcaggaatcagaagaatgaagggggacaatgaaagggatctgcttcatcctttgtgaccaagaaagcagaaaattaaatgtgccaataatcattataatgaaatatttccaagtcctagaatctgcaatattgtttgaaagaccaagtctcttgatgcaaagggtctgtaaggaaaataactttcattcattcactcattcattcatgtattcaatttatgtttattgaatcaccactatggagtagacattgaatctctggaacctttgaacttgaaccacaagttttttctgggattttggtaaacatgaatattgttgacttcatatatatccatcaacatctaatttaatacaatgaaaggcagaataacataaggttaagggtgcagacaaaaggataggagcccgtctctattactttataaagatgccattttaggcaagttactcttcatctactacaataactattagtactcacttcacagggttgttgtgagaattaaatcaacacatggaacaagcatagcagtgcttaatacatagcaagtgccatcattataacaaaatttcatattaaaacagtcctggcattatggccttaaataaattacttaaactctccaagcatctgttctctcatttataaattgaggacaacacctgcctatttacctcacagaaatgttgcgtgagtcatgtgagataatatacatagagatttttataaacagcaaagtcccatgtacttcaaagttattttcattatgttaagatctaaaaagatcaccataacaaaattttattgtttaattcctcaagatctacctcctgagtaaaaacatgaaaggaaaagcaagttcaactccttggcagagaagagataaattcttgattatgattctaccagactctactgagccgagagaaaactgaggataaaaaagaaactggtggtaaaattaggaagaagcaatggatgcttggaacactgagacacagtaaatctttacaatgagtgctgaggacaggcacgtgacccaagctaggccagttggatgctccctcagtggaatttaattcttgagtaggggaacaaggaaattgaaaacaatcagtgttcattgcattcagcacagcctcctgacactttggccctgctgtgcacagatgttgtggtctctgataccttgtctccagggctgctttcttttcctttacttcctagcctggtattctggcctctcattgattctgtgagctcctgatcctttccaataaattaccattagcctaagtcaggcttaatttctgttgcttgaaacaaaggagccctaatacctgctctaacctgtcttgtaaaggtagaccatgctatgaaatccgttatcttcctctattctctttcatgcacatatgtatgtatgtatgtgtgtatgtatgtagtatgtatgctagtgcacccagaacagctcttttatcatattatatcagtttttaaaaaatcatttacggccgggcacggtggctcacgcctgtaatcccagcactctgggaggccaaggtgggcagatcacctgaggtcaggagttcgagacaagcctgcccaacatggcaaaaccccatctctactaaaaatacaaaaaattagccgggagtggtgacaggtgcctgtaataccagctactcaggaagctgaggcacgagaatcacttttgaacctgggaggcagaggttgcagtgagccaagatggcaccactgcactccagcctgggcaacaagagtgaaactctgcctcaaaaaaaaaaatttacacatttgttcatttggcaaatatttattgagtatctaagcatcattttagattctggggatgcatcaatgaacaaaatagacaaaattctataccttcatgaatttacattccaaaacggagagacaataaaactaagtaattacatatgtttgtatacacacatacacatatacatgcttatacagacacacacatacattgcatttgtgtatacatacatgaggttagatggcaaaacgtctctggaaaacaatgaagctgagaaagataatagaagtcaaaggtgaggagctgttgtgatattaaattgagtcatgagggaaggatcactgacaaaggggtattgaagcaacagagtggagagatagagagctgtgtggatactagtaggaaaagcatttctggaagagggagcagaaaatgcaaaagtgctcacatgggaacttgcctccagtgttctaggaaatagaaagccagggtagctggagtggagtgagcgaaggagaaagtagtagatattgaggtcagtgagggattggtcagagggcagctcatgcagaaccatcgttaggacctcggtctttactctgagttaggaagacattggagggcattgaacaaacatacaagtatctacacatttctcttctgtgcccagtgtctgttggctgtcaagggctggcccatgctttccagccctggcttcaatgctctggttcacttccgtcagactggtctctctctctcttgtttttttgtgacggagtcttactctgtcaccaggctggagtgtggtggcacgatctcagttcactgcaacctctgcctcctgggttcaagcgattctcctgcctcagcctcctgagtagctgggatcacaggcacacgccaccaggcccggctaatttttgtatttttagtagagacggggtttcaccatgttggccaggatggtctcgatctcttgacctcgtgatccgcccatcttggcctcccaaagtgctgggattacaggcatgagccaccgtgcccagcccagacgggtctcttttctctgacctgaacgcaccttacaatatctatgccctgatctactctatcgtaaccccaacaaccatcaaaggccacttcaactcccatctccttcctgaagtttccccgtgcttagccagaccacagcaatcttgcacatttctgaatttttaatggacttacctctacacccccccagctgagatttagcacatactctcttgtactttattgaatttttcatgtatgcctgccttgtctatccaaaaaagatagactgtaaactttcggaacaaaagcaccatgtcttacccttctctgctgtcccttgagtgcgtgatgaaaagcagtttcatattacttgaaacaatcaccaaggctctcagcatgtctgggttctgtttcaaaggtttacaatggacccttctttcttaaggggtcttgaaaagctacgaacaaatgtataactacatcatttgctcaagtaacaccagagttacagtgtaaactcaataatcacagtccattaaattggggctgttcagggaaagtgaagccttggtcgagcaatcaaggcactggaggccatgcatgccaggtccagcgaccttgccctggccctgagaacaagccacgattgtcccctctgcatcagtacacatgttgcaaacatggaaatgcattcttcaattctgcagctaaatggcacacatggccccaagatcccagagcctgtgcaaggttaactagccttctataaacattaacacccatgggagcagcatgccataattatgagggaatataccctggcccctaagtacttgtcagtttacagaattcattctagacactggagtgaaatgtaattttcctggcaatgtttatagcagttacagctctgtaaacaggctgcctgggctgaggttgctgggttcgtgtcttaatgggaatgcacctgcagcaatggggtagagcaactcccagtcaagactcctggcctcaggacccagacccttctcatcaccttccctctatcgctcccatgaatacctggggtataaatgaacgtgtctcagttttggtgagaaaacaaaaacaaaattatgttgcccagctcttatacccaggaaacttcctctgaagtcagcaaaaggatatacgctgatttcccaaattctgttttaatagttaaagccaggaactctgggattagtaccatatatgccattaaatagttgtatgatgttggccaagctcaatttttcgtacctgcatatatgctggagaggatgagatctccaatgtccctttgtattttaacaatctgtagctacgtgtttcttcaagccccagggatgtgcctgtcttgtaaatgaagaaatggagattgtagtcataatctctggagtagaaagagaacattcaagataatctagtcattgtttctttacgatcaaggtaagacactgatacccagagtccatgaatcacttcctgaagccgcacagctatgtatagcgtaaagatccaaaccctggtcctttgacccttaaggctgagactttccattatactcaaggcttttaaaaaatggcttgtctcaaagatttaaacagacaagtcataaaataagctatgaatggtcaatcataacccaaaagagattgcaacattatttgccaccagagaaatacaacttacaaccaccaagatgctagttaaacgaaaagtaaaagactgacaaataccaagtgttggtgggtggagccatggggacattcacacatggttggtgggaatgaaaatggtatagccactttggataagagtgatcagttcttatacagtgaaacatacacttaatatatgacccaacaattccactctaggtatttacccaagaaacataaaaatgtgcacactaaaacttgcacatgaatgtccacgacagctttattcaatagcaacctcaaactggaaataacccaaataaccatcaacaggttaaaattctggcatacccataccaggaaaaactacttaggatttaaaaagggaccaagaacttagataaaaaaggatgagctgaaaaagccagataggagggcacatactatctgatgtcatttgcataaagttctagaaaaggctggagctcagggtgggagtgaactccaaggggcacgaggaaacacctgggtcatgggagtatcttgattatggtggtggtaacacaggggcatattggtccaaactcacccaactgtacacttaaaatgggcatttttcattgtatgtaagttaaacctcagtcaagattgtaaaacagaatagtgatttgctccagaataaccatgggcagtaggcaagcacaagaatgtgcaatatttaagtttccattcaggaagcatcttctctgctgctgtagggcagcgaggtgaacaggtaacagggcctggttctttgtgtgctctcaaaggtaggcatatccctggctccagccaggttgctcccatgcccactggaatagagctggccctaagccaaggcatatgtggaaaaaccaccctgccacttttatctctgatgaaaagcccttgcttagttcagcagagatgtatttataagtctgtgatctggcatggtttagatttgtaacggggcaggggaggtggtccccgagagagcagacgtccacagagaaggctaggctttggaagggctcttccagaggaggacccactgtatgaaaatgcaaggcatagatctggaggggggaatatcccttttcaggatgtgaaattcccttctgtggaatttgaggcaagggtcgggggaagggagaaggtgttaactgtgggttttgatagcgcaaatcgtgccttgacctcaaatctcctttggtttctgactttgggagaaaatgtcttcttagtaaaatgtaactgatatgtactgaggatccacatttgtgagtcaatgtgccagatgcttggggatgtgaaataagtggaaaagctttctttgaagaagtgttcagtctagtctaaagaaagatatgtaataaatcatgagctggccctgctccctgctgtttacatgaaactgaagccctttggaacttcaggaagcccaaagagtatcaacagacaccccagccccagcaactgctggcccagaatggccctgtgctagccacgttcggccagcatctcttcatggttccttgtgctcatccctttagctccatgctctggagcctgagaccggcctcagctgttctcacccagatgatgcatctgcacccatttctcccagacactgaccctcgacttgccccaacccaaaggattccttactagattagccaggcgttaagcatccctttctctctacaggaaggtggaatggacagatgctaggagtggacctagcttccaaactggaattctggaatactgtatatagtgaatagtgttccatttttaaatgcagccttatgtccataaataattagtgcttaaaaatatgttcaagggatagaaactgtgtaaagcaaaccaaaatcatttctgacattgacatcagtatcatatcagttgcaatggactgaatacttatgtccagcccaaattcatgtttaaatcctaacctggaggtaatgatattaagaattagggcctttaggaggtgattaggtcatgagggtggagcgcttatgaagggattagtgcccttttaagagagaccccagagagcaagctggatctttccaccatgtggagatatgccagaaggtgccatctatgaagagagccctcaccagacaccaaatctgctttgccttcatcttggacttcccaccctccacagttgtgagaaataaatttctgaagccacccagtttatggtattttgttatagcagcccaaacaaacttagacaccagccgtgtctttctgacaaatgaaagatacatgttgggcagtagtgggatatcaggttagtcatatttctaaaataccatcttcatcattttctccccctctcaagaatctatggtacctccctattgcgtgttggtgctgaaggaactctgtgctcagtctctgcttagtgtacaggggatcgagttcagaatgaccttacgattgcttagcctcacacagttccccctggacctgtgtgagttggccctgtttaatggatgtcccagtaacttctcattgcaataatgatcaatcccaaggaaggttttaaaatttcctctgtcatcagtcaaagaggacttttcagaatcctaccttgtctacaccatgccctcacatgcacattcagggagagttgccaagcttgctccagagtaatgcagctctccttgcctggcaagctaataaattcaggccccatataaattatattttgatcttcagttcttcggctggttttcaaaattctctaacacttaactttacccaactaacctgatatcctagttttgcccagcctgtgccttctatttcctttgaggcacatgacagttcgtggcttactctttcttggcgttcctcttggcttggcacaaggtcttgtgggtatgaagatgaaaggacagaagccctggactcaaggggctcatggcacatgaggaaacagacatgaaaacagacaataagagcaccacaatgtgtcgtctgctgccagagaggtgcacaagaaaccccaagcactcacattggcctggcttactgcaacttccatggttaggtgctcaaggaggtgcccccaccctatccatcatttcaaggcccattttattcgattcttctccatgaagccatcttgaactactccagcccaaagggctttctcccttttctaacttcctaatacatgtatgcctcaagacttaacacttacttctgaccttattgtttcttacctctctaccttgccagggatttgggtaagccttagccttcttctgatcattgttcgctctcccccatctctctccagcaccaaatggagtgttcataaatatttgccggttgaccatggatgtacttttagtttacagaacaatattgaaatattactacttccttgagattccctaacatctgctctccaattttcatcactgctcaatgagtcaaacactgggactgatggtattaggttacagctaattcatttcccttcattgtgtgcaaatgtcttctccaacatgtggccggagctgcccgtttctggcaggaaggtctgtgattgcagggaccatggtttagagagtgttttatggtgaggccattgttgatactgcttgctttccccatcatttgccttgattttcagtgcatgttactgctgtaaaaattcaccatggtaaaaaagtctagatctttttttcatgtcctggtttcatctcagcatttcctaaaggtagctcattagcaaaatatcctatgtgccgtggaacacagcagtggggagtcactgttctcaggaagagaagggacagattaaattttttttttttttttgagagggagtctcactctatcaaccatcctggagtgcaatggcatgatcttggcttactgcaacctccgcctcccgggttcaagcgattctcctgtttcagcctcctgagtagctggggctacaggcgcccatcacaccactcctggctaatttttgtatttttagtagagacggggtttcaccatatttgtcagacaggtcttgaactcctgaccccgtgatccaccccccttggcctcccaaagtggtgagattgcaggtgtgagccaccacgccaggccccgattaaatttttgaaggattaaactgatggattagacgcagaaggccagagattaagtatgtagattggctacttgagaagctatcacaaacctagagccatataagtgaaaagagtgcttctagaaacacaaatatataataagaatacttcaaatatgtagtattcaatttttgttaatcaatactaccaatattttcattattttgaacaacttctaacgctgatttgattagaaaagtgcaaaacaaatgcagggctgaaaaggcatggtcaaactgatttggcacctgctttagagcaattgtcgtgctgtgtagttgttcatctgttatgtgctgtcttctgagaagctcacaggtgcttgaggacagggcttctgtctttctatctctttgtttccaaagacctcagcatagcagctggaccaaagcaaccatcccttattaagagaaagggccaagatgatgctttcctgatccttctggacattcctgtcaacaaaggggagcatttgttaagtcaaatttgttgcttatctaatatgtctaactctttcctataatgtatcacactggttaatctgaagatgccaaacaaataattttccacccatgtatatttagctctttatactctttatctgtcaaggacaaatgcaaaaccatgcagaaaactacataaggatttatgcaaaagagtgtccattacagtgttatttatactaccaaaaaattacaaaggatcttccttatgtccaacaataaaaataataaattataggccatccacatgatggaaaatattagacatcatggtattgaagaatgtctgggaatgatgaaatattcctctatcagcaaattaaaacaaagctgagtgcagtggcacacactcataattccagctccttggaggctgaggcaggaggatcacttgaacctgggagttcaagtccagcctgggcaacatggcaagactccatctctaaaaataaaataaaataaaatagatgaaaataaatagtaaacaatatttaatagagttctaattttgtaaaaatatatatacataatattagtgattatgatcagcatttggcttttattttcctttccataattcttagtgtttttagtttgctttttattttatttgattttattattgctatttcaacttcctttcctcttgcatcttttttttctctgttttgtttttgttgggggtggtggggtttgttttttatttgtttgatttatttatttttatttgcctgatatattcttccattcttttatttttagaacttcaggtatagtttttaagcgggctttttttttttttttggtagagatagggtcttactatattggccaggctggtctcagactcctggcattaagagatcctcccaccttggcctcccaaagtgcttggattacaggcatgagccactctcctggcctttaaatagtttttaatgtctattgcaaatagcataatatccacttttttctttatcaaatctgagaatctctgacttttatatgtgaattaaatctaatcacatttattttgattacttaaatattattttgcagttaccattcacatgctttttcttttgtttgtttttgatactctgccttctgttgaattcataaagctttttatattttgcgcttttttcctttcaatttggaaatcatacattgtatttatatgcttttagccatcagctaaaatttggaacatatatgctgaagtttatgttttgctaacaaggcctacaattaatatcgctttcctcccccaagcacattcaaaaataagcatgctttcattttttcccaactttcattctcccatctttttgtaatttcatctagtgttttgcctttgttgtatgttataacaaaacattaatagtaataatcaatatatattttttattgtctatggttatttaaaatttccaacatgatttcaatgttttgtgctcaccattgtttctcatatttcacttcttcctttttgttttttaaactacaatacataaatccacttatggtgtgtgaggaagggtctctaggttgtaaattttgttaatatttgcatgcctaaaatgtctttactttgttctcattcttttaaaagttatttaaaaatttttaaatatactaaagataaaaaaagcacaaacaacaatataactgagtttgagttaacaattttcaattcttgcatcatatatttttttaaattctgtataaattgaactgaaatctcactttcctgtatctcctctctgcaacacacacattgtccctttttcttccctggggataaccaccatcgtgaagtaagcgtgtatttctcatgtatgttttttgtatacttattacacgggcatgtctccttaagcaatgtatgtatagtactgttttgtgtcataatatacctatcttagttgcatttttttcccccactcatcatgagtcttggaaattcatccttgttgacacatgcaggtctagttaatctattttacatgctgtgtaatcgtgtcatggtgtaaataaaccacagtttaattgttcattcagtcacttcagggcagttggcctgtttgcacatttcactattacatacaatgtggcaatgaattttgttgttaacatttgttaccttggacacataggtgagaatttctctagggtagcaactagaaacaaatgtgttgtgttgtagtgtgcacatctttggctagactaattagtgtcaaaatgaattgcttcaaattatagtcctacctacactgcataaaagttgtcgttttctcacacttgatgttatcagattatttaattctttccagtccgatgggcaagatatagtgtccaattgttgttttctttatttatctgtttttttttctatgttgcctaggatggacttgaactcctagactcgagtgatcctcccacctcagcctgcaaagtagctggaattacaggctctagccagcacactgagccctaactgttgttttctgttgagtttcctgattactaatgggcctgagcatcttttcatatgttaattgtactctttgggtcttttcagtgaattgcctcttaatgacctgcccatttctttctttgcttgttcaacttttattatttttaggagttctttatacactttaaatactgtaaacttattggacagcgttcctttgaatattgcctttgttccattctttctactttgttattctggaatccttattagatgaatgttgtgatacagtattgctttctcttgtccaggcctcttaactttctttctttctttaatgtttttgtctcttggtatgttttctgtgtggtttatttagttctattttctaactcactaatttttctctgccaatctaccatttaacccactaatttatttatccattaaaaatacatatattgattgcaaattatgtatcaggtactgttctaagtgttagggtttaaacaataaacaaagcagacaaaaagaaaaacaaccacctttgccttcatggacattatattatattagataaaactcaattgagctttaaattatatttactatttttttacctgcaagatttctacttgtttcttttaaaactatttttcaaatgataatttcttgcccttgaatacaaagtccacttcttcattttatctttcttttaacaaacgttaagatattgatttaattttctgtttagatttattctacttccttgggtgtattatggtttggtttctcatctactgactaagttttaggacggagtgtttcttccgtgttttgtaatttttgactgtgagttcgtctttagtagaattccagcctgtaaaccggattaaaaagacattctggattggggatagggaggtgttgcaaaattgcctgtgcttcagccttgagatggttgctaggttcacacctgtttttaagttgtttcttcattctggactgtgtttcacagtgattgatgggagtttagatctcaactaatacatagcagagctcagggttcgcttcttgcaagttactctatttccaccaattgcatggtgtgcggctcacttctaggatccagacctcaggccagtgtgtgatttatctcttctgcctctagggatgaggaaattcagttatgctactgctatgtactttgccattgctccacagggaagtaaaatttcctctcctaaggcatagatccaatccacgtccctctggtggctgaggcattgagtgtactcactctttgattctagactgtgaaaatttcccattttaaagtgtaaatatgtattctttagttaacacagtcttcacaaatgcaaatgtttctaataatggggctgagggaggaaaatgctgagtttgcttagtcttacatcttaactggaagtccaaaaatttttgatcatagggtagttttacacttaagaaatcatgaagaatctaatcaaatcatgcatttagaaaaaacaatgtgagtttcggggaagaaaatttaacaataaactagagattggttgattgaaaagaatatattgggggccagagaaagaacgagggtttcaggggaacaagttctcagctacacgccccaagtttcaactctcatgggttctatataatatgattttataattgcaattccaaatctatatccccatcttcaatataggctttttctctgagttccaggcctaggtttacaaaaggcctccttcatatatgtacaagataacttctactagataatttcaagttttgtgtattatgaaaaaacagatttaataatcccacctttctcctctacttccaaatagctttttctcttttactcctggaatttgctgcatgagccaaacagttgatcatatcccaagttagaaagtcaaaccacacttttctttgcccctcactatgcatatatcactgtgaatttgggcaccaagtcctggtgatgtcatctctgaagtgtttcctgattccttctcttttccttcttttccatctctaccactactgagctgtagtagtagctgacccctgtcatttaccaccatatgggagccacagcctcttcactggtcctcctctctctctctttcttgtcttccacacgtcttccttcctgcagccagaatggactttctaaaacgttaacctaatcatactctttccctgttcacatcagagacagagacctgctcagcaaagcttgatgtctctctttcacagtgttgagttgttgcagggaagtgctgcctccaggggcacatatgccaggatcccccttgcgtttagattgagcttgtgattagttcttgtcaatggagtatgacagaaattttgcatgtttacttgtgtgtatgtgtgtgtgtctgtgtctgtgtcttttggggctgaagtgggtaattactgctatacctttccatatagcctctttccccaactacagaaactctaggaactgtgagtgaagatggtgaattcacgaggtttatggtgtttgagtccctgaatcctttcttggaggaaatccatccaacaattaacaccctcattagattgtaccatgaataataattttcttgttgttgtgttaatccacttaaaatttagagattatttagttcaacagctagttgaaccttaacaaatattttgattagatcatacaattcctctaaacataacttcaaaaatgacttagaataacacacaagacttctcatgacctacttgtattaccaaatctctaattactacctcttcctcctaaggctcatgccacctccctacaggtaaccccatatatgccttcttttaccttgccttcacaactttgctccatctgccttgaatggtctttcttctgtttattaattctattttttttttctaagacatagctcagacatttcctcttctggaaggcctttccttactatttcttcaaaagcttctccatgtatcaaacttggtaagatgttgttaagcttgctcatatgacatttttcatagttaaacattgtgtgtgtgtgtttgtgtgtgtgtgtgtgtgtcctcaaaatcaacatacaagctccatgaggaaattagcgcctgcctctcaaatatctcagcacctaacacaggacaagaggccggttatatcccaagtttcactcaggtgctccagaactattaactgggttgaattgaatctatagtcatggagataaaaacaataagaaaaagagaggattagagaggtgaagaggaaaaatgatgagagctgacctaaggaagagtaccacagaggagggttcgcttctcttgttaggtagaatgagatctatgggactaagccatcaattgcaaggggcttgtccttctaagtcagttggacaagacccatcactctgaaggacaaggattccattggtttagccaaggattccaatggtttagctagagttaagcaaggtaagagtgaccagctagggggaagagaaagttaagccctgcaacttagctgtttacttataaatcttttctaataaaatatgccttacactccaagttcactgctgacttaccaaggatgcaattactaagcaaaggcatagacacaggctttgttttcatagtcacacactaaaaaggagaggcttaagcttgaaatgtggtggtattggtagaatgaagcaataataggtgagtgggagccttccacaaaaaggcattcttgctgctttcactaaagtgcttgcattctagacaataatctttattttcttactgctggtgaaagtaaggaaatgaggaatatacaactatattgactatggtcaattaacggtccattcaggctgacagctcagcagtgcctgaccttccctctaatgcgcatgcagatcacaggacctagagtcagtctgtggccaagaaatagaccaccaattcaacctgtgcacagcaatgtgttctagattcagtacctaaatgctcgaagtatattctcaggtcgccgaattatttaggcaattgacaatagactgtgtggctcaagggacatttttttcccccaccagataattagaagtaagcatttactttggctttaggtagttagggtgcttttattagtaatagaaaatgccgctcagattggcctaaaataataaatgtatggctcataagactggaagtctaataatagggaatggaatttcaggttggttaatccaacagttcaacaacgccatcaaggacatggcttctcatggcctctttattttgctgcccataataatggcttctattcagggctagcagtaggccctagtccaatttgtaggatctaaggatagaaaaaaaaaagagcccctccctcaatcctgaaataaaattcttccctttgctgtaattgtcttgtgtctgctctggacccataactggtgcaaggaaaaacccaagcctttactggtgtcactccaggttcctcagacaatctgatgggattatcttgtttggctttgattaatcaatactcctctcattcctggagttggaattatttcctaaagcatcatggatattacaaaatggaggaggagtgcagagcatcttggacaattgaatacaatgtctggtgtgcagtttaaaatcattcagtgagaaacacagacagagacagagaaaagaaaatcaagcttaattgagtaatttattttttggcaccatgtacatagactcagtgatgcaacagagaatatccaccctgatatttcactgataaggagacaccaccttttgttcaactcttgtctgaacaccaatcagagagaatgaaaaaaaagtagaattatttttgttatattctctttcttcctcctcttattcctcctcctttttctttgcttacttttgaaagatattacccctcaccttactcctaagaccaccttttggtattttcctcaaaaagcaaaaagttaaagtaaaaagcaaacaatttttctcacgcagatcacttgtttggaactacatctaaatgctattcagtcaccacatgtgactcatctctcagctctctttaaaaagtgcattcctggctgggcacggtggctcacgcctgtaatctcaacactttgggaggccaagacatgtggaccacaaggtcaggagatggagaccatcctggccaacatggtgaaaccccatctctactaaaaatacaaaaagtagctgggtgtggtggtgagcacctgtagtcccagctactcaggaggctgaggtaggagaatcacttgaacccaggaggcagaggttgcagtgagccaagctcgtgccactgcactctagcctggtgacagagtgagactccatctcaaaaaaaaaaaaaaaaaaattcctgctagactctaagagcttaggagagtaaccaaattaagcccaaacatatgttggactaaataaaacaagataattaaggaattttaatagatatggcatgattttgcagaagcggtaatgtgtgtttaaaggtagaaatcctgggttcaaggctatttgttggaaattatcttaaaaagaaggctgggctaagggcaggcttttcaaggaaagagaaagaatgaatttagtgttttggactaggtggtacaagagggctcttagcaagtggatctttttaaaacctggaatgttatacaaggtgtgctgcataatttaatttacaatgatgttcagataagagtgatttaaaatatcctgtgggaaactcggatgaaatattttgatgacagacaaagagagtaagatgaatagatagctacaagtgaaatttccaaaaagggtcaattaccatgtcatttgagtgtgaggaaaaataaaacgtttggttgaggcttctgcgttttgactttagtttgtttgtttgtttgtttgtttgtttgttttgagacggagtctcactctgttgcccaggctagagtgcagtggcgcgatctcagctcactgcaacctccgacttccgggttcaccccattctcctgcctcagcctcccgagtaactgggagtacaggcgcccaccaccacgcccggctaaatttttatatttttagtagagaaatatactatagttttagtagagaaatattcacagtgttagccaggatggtctcaatctcctgacctcgtgatccacctgcctcagcctcccaaagtgctgggattacaggcgtgagccattgcgcccagcctttgactttagttttgactaatctgcagatcttctgcagaccctagtgagtctgctatctgtggaagatttcagtattctctgggatgcagcattttcaacatatcggaaaaggtgtcataaatgcttctgacagtgctcttgcttactgccctcaacatctgcagctggtggttggcatcctcaatgcccagcccagagtcttctgcaaggactcctgaagatggtggagatcattcaaaggcccatcaagatagaaaaaggctgtagtttgcttgcccatgtggccagctagcagatctctggaaactctctctgctgctgccacccccacatagatacttgtggaggcaacataaaccacagggacaatcccaccaatttattgaggtgctaaggaaatggaatacccaatgggtatcctccccagatcaaattgcttctcttatatcctaatccaggttcagataaggaacttctctctctctgttttaacttttaagttcagaagtacatgtgcatgtttgttacatatgtaaacttgtgtcattcatgtttgttgtacaaattatttcatcaccaaggtgttaagcctggtgatcattagttatttttcctgatcctctccctcctcccaccttctgccctccattaggtcccagtgtgtggagaagggggaatgcttatacactggtggtaggagtataaattagttcaaccattgtggaagacagtgattcctcaaagaccaaagaaaatgtatgcgtacatacttacatacatgcacacatatggtcatgtggtgagaagctgctacaaggaaaattaaggtgggtacaggatagagtgaagcaatgtgaaatagttgagagtggaactgatgaagtaggaactgatcagaatgaaataaaattcgacccagccaacccattactgggtatatacccaaaagaatatagatcattctgttgtaaagacatatgtacccctacgttcattgcaggaacttctctttctaagaacagcagaaggtagaattcagtttctcgtatctctgatctgtacaagctgagttgtggtctttattaaatgctcctattacacaaccaacttactcattgttttattatttcattttgcctcttatttagttcttggcttactacatcagtaactaatgaatgccttcttgtcaataataagtatttaagaaagagatttcaaaactcccttttaatctatcctctcccattttctcactgttgtcagtttggtgaggaatatttatcttttcctattcatgtacattcatataaaagtgtaggtagaaatacttgagtttgcttaacaatttttaaatataactctgataatctttataaattattctgctgtatgctttttactttttacagtgtctcttggagaaccttctgcatgcaaattttttaactttaatttttgtaattgcagtgaaatatttaatagtgtgtgacatattcaccttctgataaatatttattttttcagtttttttttttctgtaatgaacaatactgaaataaaaatcttgctgggtacagtggctcacgcctgtaatcccaacactttgggaggccgaggcgggtggatcacctgaggtcaggagttcgagaccagcatggtcaacatggcgaaaccccacgtctactaaaaatacaaaaattagccgggcatgatggtgggcacctttaatcccagctactcgggaggctgaggcaggagactttcttgaacccaggaggcggaaattgcagtgagccgagatggcgccactgcagtccagcctgggccagagcaagactctgtctcaaaaaaaaaaaaaaaaaaaagccaagcactgtggctcacacctgtaatcccagcactttgggaggctaaggcaggtggatcacctgaggtcaggagttcgaggccatcctgaccaacatgaagaaaccctgtctctactaaaaatgcaaaattagctaggcatagtggtgcatgcctgtaatcccagctactcaggaggctgaggcaggagaatcgcttgaaactgggaggcagatgttgcggtgagccaagatcgtgccactgcactccagcctgggcaacaagagcgaaactccagctcaaaaaaaaaaaaaagaaaagaaaagaaaagaagaaagaaaaagaaaagaaaagaagaaagaaaaagaaaagaaaagaagaaagaaaaagaaaagaaaagaaaaaagattcctattctgcctatgtaaacctatcctctaagtcagaggaagctgagaggctgaagaaggaggctgacaaggtcagttatttagaaaaaaacagttaataaggacttataaatggaagccatgtctgtgtctagggcagaggctagactaaatggtggatacccatgcgattacccctccagagtcagggcttgtataccatagggaaatggtatatgtgattcagaaggggtgtgtaggacaattgaagtacgacaacatcaaggttgtttgacttaagggcaggatttacggtaagcacctctcttacccaaggaataatagataaactggaaatctgaaaggacttcctggaactggggttattcagaagtcaacatggctgactagcatccaagatggagttgctttggcttccatactccacctccctaatccagcttttagaatctcacatgcacctctcttccacaatggttgctgagcctttagggagagtgcttgatgtgggatagctttagcagcagtgtgttggcaatggaaaacagattaggcccagtgggattccaaatgagaggcatttacaggctttgttgaattgtctgtagtctttaaaatactaagactttggttttctcagaagaagtaaaacaaagacagatacataacattaataatttgattagtagacatacaatgcacaggaggattacaatcaaaagagaatttgtaagccagaacaacaaaaacaaaagagaacccattcctttagggagaaaactaaaaggatcatgaagaaaatgaagactcggtacttctgtagagacttgttgtagccaggaaagaactcagaatttagcccagattgtacacaaataataaaaactcaaaaataatggtcagggccagaagctaaacttttctctctccagtttccccatttctaccaaggctgaatcataatcggaccaattcatttgcaaaattaattttagtctcattttacttggcctgattatttctacaaaatgcagcaagaatagtgattggccacatacggccctttatatcgtctttgctgcaacatttttttgtaagcaatctcagattagactttttaaaagcctcaaggccagaatccaagccaaggattcaccaaaattctgtgcttgtaatacctgtacaaatttctctcttgttgaggtcccaaaatattaatatcttggggtttctgggcctgtcaaaaagtgacattctttactcactacaggccacgaaccttgtaagggaaccatttagacaaagtaccaagtcagtttgtcctggaggctttttattcactgtataaagtcaacttctattcctcaaaacagtgttgtcataacagaaaatatgcatttccagtcaaagccttggtaaaataaccagcatctccaattgtgtcctgatacaaaagaaaacagattcttactggactataactatattgccataaaaaagaatacacgaaaattgtttccaaatgttggagaaatcaggtacagagaaaggtaaattttgctcaaaaaaaagtatactttgtaagctataaagagctccaaagaagaaaggtttccttgacgattcttcaatcagagtagcaagcctcccaaacaggatattttgtcccttcaccttggagctgccatccacaaaccaagcagctctttttcagcaagatgagagctgtttattgggcactgtagaatccagcagctcctcacatagttccagagtcagccctgggaaaaaagagggtccctgctcctctttgcattccccagatagcaagatcctatatgaaacatttccattttatcacggaactgtttgggacattgctgttcctattagtatttctctgacatcaccctataacccccactaaattttccacaaggattatggaatagaaaatttgtacttactagcattccagcttccactctacactctgtgagctcagacaatcctactggttcccatttagtacttttcgaagggcaaggttacatgccttctgttttgcagtactaggtaggggaagcattcccaagccaaacataatatttattttcataaaacatttaggtgaaggagacgcaactactttacataatacctgttgaaacattccaactttcataatcatatcaacctttacatttttatgttctggttccaggaacttttcttttccacctccagtccattttaccctttcttgtgaaaaataatttggactcccaacagagggttgagccaaaggacccaggcccttttgtcagtctttatcttgattaacgtgcctcaacaatgccccacacaatgtcagctttctcattgtaattttgcctttttatttttaaaaaatttctcccatttgagttaagcacagaaagttgatttgtgtccctttaatgttgggggaccagcaggagctccctttggttcatcctatattcaatagtgttctattaaacttctgttttaacccctcaatttttatttatttcattttattcttaataaccctctaaaaatttctaccctgctgggaggagtcccatgactctctcctctcttgttaattaaccttatgtttttattggcatctgtaagctaaagcttctcaactgttaagattctgcaagggtaacatgtagttaaggatgccctcttaaccacaccttttaccatgatctaggcaatgggcatattcagtgactgaatatccctatcttcataaagccagtccaacataacttgcatatgaagcatatcagttgcttcatatgggatgctctacttggcatttataggtggagttggacagtgctccttctcagggtagacagacctgacagtggcttttgtccaatctactaggctggctgttcctacaggaataacctcctgtgtgtctggatcctgtatagccatctgtaattgttcaatagtgagctgtgtgtcctgcatcaacccaaacatggttttccactctaccgcaattaaaactaaagatgctgcccctaaattggttactgtcataatccattttggtaaatgttcctcagggagctgatgataccattctataaaactcaagagttccatcacattataccctctggtttcaatagttatttggttttgcccttaccccacattgacttccttcttgttaaccacaggtctcaggtaatttctgtgccctgaaatcattttcccttttgtaggtagctttgaggttagtgaccttcaaaccacctttgcaaaacttttgtcagtgagaaaattatgggagtggaggagatctgatctagccaacccccctttttgcctttaactttcaagctgccttaattattcctgggcttaagccaagctaactttagaagacatttaggaagtttcaataataatagcccttccctgaaactcagctgcctttgtaaagctaatgagagaccaccaggctagcgggaggagaggagcctgaattctgctaaggtgtagactggtcacaagatatgtaacttccctattactcctgcagataacatcactattttggattggctttttgaaatattttttcaggttttttgcatgtctgacaccaatggctccacctggacccgatggctccgcctggacctgccaaactcctcctatggttccacccaggaacaactcagctcaagaagacagtttcaaccacctatgatttcatctccatctcaaccaatcagcagtaagcaaccatttcctactcactcccacccctttcccaaactgcctttggaaaatctctaacctaggagccttcaacgagattgagttgaatagtaataactctgtttcctgcatggcatggccagcccggcatcaattaaactctttccgtactccaatgctgtggtctttatttgtgcagctggcaggaagaacctgttgggcagttataacctgaattcaaacagatccgcatctgagcttggtccagcctcatggtccaacccagcactctcttttactttcattttggctattacagataataataaccaaggggttgcctattttgctttttccttattagtttgcatttcagtacgcatccagtaaaccaactttctgcgagttggagccatctttaaatttcactactgaccctttcctttagaaactgagcacagcaaagctggagctccataccacgtggccacccaggaatgaaagattccttctacacctttctattctttctctttctatccgtttagctttagctatatcatttttttctctcactttgaaacaatctttaaataccctctaaactaggcaaaatttctttttttaaaaaaaattttttgaagacagagtttggttcttgttgcccaggctggagtgcaatggtgtgatctctgctcatggcgacctccgactcctgggttcaagtgattctcctgcctcagcctcctgagtagctgggattacaggcatgcaccaccatgcccggctaatttggtatttttagtagagacagggtttctccatgttggtcaggctggtctcaaactcccaacctcaggtgatcttcccacctcagcctcccaaagtgctggggattacagacataagcctccactcctggcctaggcaaaattttctttaagcaaaaactatgccttcctttttaaaaataaacttatttaccaaaacacatctttctttatacactttgtatataaaattgtttctcttatatctagtagttttgtttttttgttgttgtttgtttgttttttgtttttgtttttgagatggagttttgctcttattgcccagctggagtgcaacggcgtgatcttggctcaccacaacctccgcctcctgggttcaagcaattttcctgcctcagcctcccgtatatctagtagttttaattacatatattaactactactgtaactcttagtaacccttattttcagtgaaaaacttagaattacttaacataacatgtctttaagatttttaattactgaaaagaattttgaaactagtttggttttatttaccaaagattactaaagtcaagtgaactaaaaaaggcatttgagttggtttttattctataaaatatttgatgtaagagcttactttcctttaagccaattaattagagctgttttatatattttggtagtgatatatcatgacacatataaacataaagacctacagacataaatacagaaacagattttatagattgaaaagattctttacttgtcagtgttcaaatagtttctctccttcctttagactatcaattacttccaaagacatgacttttatgtaaaataaggtagaaaattcatatctcaaaggcacagaactttgacctaaacaccattatctgaaaacaagattgccagaaaagtgtctgcttttaaatttaggttgtttcttaatcagattactggttttaaggtggagccttttaatgagtagggcaattaaagcatgcagtttttagggcctaaaccatgttttcttatccaaatgtacgaagaaacgggtagcctccataataaaaaccttttacttcaaacaactgtcattagccacctctgacacgatagctcttacctgtgactgccagccattacacacagcaaggtcaagtcctctcacagcacaaagtaatctctggcatccccacaaaaccaatgcgatcattaatgcaatacaaaagagggcagcgttttaaagctgaaagtaagcagttcacttaccacttttggggttccataaggaaaaacagagattccttccaaacagggtagcaatatcccagcttcccgttgaggtttatcacccgtctctctatttattcaggtcgtacatgatgtccttccccaaaatttatagtcttcatataaattatgcacatttatttatttatttatttatgtacttatttatttttttgagacggagtctagctctgtcgcccaggctggaatgcagtggagcaatcttggctcactgcaacctccgcctccagggttctagcgattcttttgcctcagcctcccgagtagctgggactacaggagtatgccaccactcctggctaatttttttatttttaattacagatggggtgtcaccatattggctaggctggtctcaaactcttgacctcgtgatctgccctccttggcctcccaaagtgatgggattacaggcgtgagcaccatgccgggccacacatttctttttaaatttaatcctaattacacaatacttttggggggtgtgtgtgtgtgtgtgtgtgtagggagtcttgtaacatgatcatcttatccatctcatatttaaaatggttattactagtacataggaaaactgttaacatttgtttgttagtcttatattaagttattttactgatgtattagagtaggccaactgctgtaacagacactccaaaacctcaatgatttaatagaataaaggttcattttgcacccatgttcagaccaccattggcctgtggtggtggcggtggggtctcagtttcacatagtcactcagggatccagggtccttccccttagtatctctgccattcatttaagatcttggagtcttccctgggatccttggcatttggccacaaatgaggtacatgagaaaggggttggaggataaaaggagtagttttatgagcaaagcttaggggatgcttatatcattttccctccacttcactgcctcagaaatatgccctgcttaaatgtagtacagctgtgtgcccagaaaggaagcatatggccagcccctgccacagttgacctcttataacctaatagtttcttaattgtgtttcttggatattaaaggcaactttatttacctaaatgtatttataacctaatttcactgtctgggacctggagtaaatgtggaacactatcagtgttggttataatttggtgtttcctgtcggtttctggtaagttttcccaaacaagttaaaatgtctaattctattaaatatgttttgacatcctttgaaataatcatgattctatcccccaatctattaatagtattgtgatagaattttttctatcatgaaacattattacatttttggaataaactcaaatgatttttgatgtgttatattttaaataccctactagatccagtagcctagtcatttaattataaattttgtgtctgtatttgacaataatatggctcatagttctcttgtttttctactatcttttagggttttgtataagagttaggttcatatcatagaattagttggaagtctttacatctcccctgtgcactgtatatattgtataaaagtttatgaaactagagacttttctagtctttgaatgtttgccaggaccatttgattctggtctccactcaccacccatttctaaattttacttttaaattaacttacgtagtaaagttgatttttttattattatttttattttttattatactttaagttgtagggtacatgtgcacaatgtgcaggtttgttacatatgtacacatgtgctgtgttggtttgttgcacccattaactcgttatttacattaggtatttcacctaacactatccctcgcccatccccccaccccacgacaggccccagtgtgtgacgttccctgccctgtgtccaagtgatctcattgttcaatttccacctatgagtgagaacatgcggtgtttggttttctgtccttgtgatagtttgctcagaatgatggtttccagcttcatccatgtccctacaaaggacatgaactcatccttctttatggctgcatagtattccatggtgtgtatgtgccacattttcttaatccagtatatcatcgatggacatgtgggttggttccaagtctttgctatttcgagtagtgctgcaataaacatacgtgtgcatgtgtctttatagtagcatgatttataatcccttgggtatatacctagtaatgggatcactgggtcaaatggtatttctacttctagatcctcgaggaattgccacactgtcttccacaatggttgaactagtttacactcctaccaacagtgtaaaagcattcctgtttttccacaccctctccagcacctgttgtttcctgactttttaatgatcgccattctaacaaatgtgagatgatagctcattgtggttttgatttgcatttctctgatgaccagttatgatgagcattttttcatgtgtctgttgactgcataaatgtcttcttttgagaagtgtctgttcatatcctttgcccactttttgatggggttgtttgatttttttcttgtaaatttgtttaagttctttgtagattctggatattagccctttgtcagatggatagactgcaaaaattttctcccatttggtaggttgcctgttcattctgattgtagtttcttttgccgtgcagaagctctttagttaaattagatcccatttgactattttggcttttgatgccattgcttttggtgttttagtcatgaagtccttgcccatgcctatgtcctcaatggtattgcctaagttttcttctagggtttttacggttttaggtctaacatttaagtctttaatctatcttgaattaatttttgtataaggtgtaaggaaggcatccagtttcagctttctacatatggctagccagttttcccagcaccatttattaaatagggaatcctttccccatttcttgtttttgtcaggtttgtcaaagatcagatggttgtagatgtgtggtgttatttctgaggcctctgttctgttccattggtctagatctctgttttggtaccagtaccatgctgttttagttactgtagccttgtagtatagtttgaagtcaggtagcatgatgcctctagctttgttctttttgcttaggattgtcttggcaatgcagactcttttttggttccatatgaactttaaagtagttttttccaattctgtgaagaaagtcattggtagcttaatggggatggcattgaatctataaattaccttgggcagtatggccattttcacgatattgattcttcctatccatgagcatggaatgttcttccatttgtttgtgtcctcttttatctcattgagcagtggtttgtagttctccttgaagaggtccttcacatcccctgtaagttggattcctaggtattttattctctttgtagcaattgtaaatggtagttcgctcatgatttggctctctgtttgtctgttattagtgtataagaatgcttgtgatttttgcacattgattttgtatcctgagactttgctgaagttgcttatcagcttaaggagattttgggctgagatgatggggttttctaaacatacaatcatgtcatctgcaaacagggacaacttgacttcctcttttcctaattgaataccgtttatttctttctcttgtctgattgccctggccagacttccaatactatgttgaataggagtggtgagagacggcatccctgtcttgtgccagttttcaaagggaatgcctccagtttttgtccattcagtatgatactggctgtgggtttgtcataaatagctcttattgtttagataaacaataaatatctagtttattgagagtttttaagcatgaagcgctgttgaattttgtcagaggccttttctgcatctattgagataatcatgtggtttttgtgtttggttctgtttatgtgatggattgtgtttattgatttgcgtatgttgaaccagccttgcattccagggatgaagctgacttgatattggtggataagctttttgatgtgctgctggattcagtttgccagtattttattgaggattttcacatcgatgttcatcagggatattggtctaaaattctctttttttgttatgtctctgccaggttttggtatcaggatgatgctggactcataaaatgagttagggaggagtcactgtttttttattgcttggaatagtttcagaaggaatggtaccagctcctctttctacctctggtagaattcagctgtgaatccgtctggtcctggattttttttggttggtaggctattaattattgcctcaatttcagagctgttattggtctattcagggattcaacttcttcctggtttagtcttgggagggtgtatgtgtccaggaatttattcatttcatctagattttctagtttatttgcatggaggtgtttatagtattctctgatggtagtttgtatttctgtgggatcggtggtgatatcccctttatcatttttttattgcatctatttgattcttctctcttttcttctttatttgtcttgctagcagtctatcaattttgtttatcttttcaaaaaaccagttcctggattaattgattttttgaagggttttttgtgtctctatctccttcagttctgttctgatcttagttatttcttgccttctgctagtgtttgaatttgtttgctgttgcttctctagttcttttaattatgatgtagggtgtcaatttttagatctttcctgctttctcttgtgggcatttagtgctataaatttcctctacacactgctttaaatttgtcccagagattctggtatgttgtgtctttgttctcactggtttcaaagaacatctttatttctgccttcatttcattatttactcagtagtcattcaggagcaggttgtccagtttccatgtagttgtgcggtttggagtgagtttttaaatcctgggttctaatttgattgcactgtggtctgaaagacagtttgttgtgatttctgttctttcacatttgctgaggagtgctttacttccaactatgtggtcaattttggaataagtgtgatgtggtgctgagaagaatgtatattctgttgatttggggtggagagttctgtagatgtctattaggtctgcttggtgcagagctgcgttcaagtcctggatatccttgttaaccttctgtcttgttgatctaatattgacagtggggtgttaaagtctcccattattattgtgtgggagtctaagtctctttgtaggtctctaaggacctgctttatgaatctgggtgctcctgtattgggtgcatacatatttaggatagttagttcttcttgttgaattgatccctcctttaccattatgtaattaccttctttgtgtcttttgatctttgttggtttaaagtctgttttatcagagactaggattgcaacccttgctttttttttttttttttttttgctttccatttgcttggtaggtcttcctccatccctttattttgagcccatgtgtgtctttgcatgtgagacgggtctcctgaatacggcacactgatgggtcttgactcttcatccaatttgccagtctgtgagtctgtgtcttttaattggggcttttagcccatttacatttaaggttattatttttatgtgtgaatttgatcttgtcattatgatgttagctggttattttgcccttagttgatgcagtttcttcctagcattgatggtttttacaatttgacatgtttttgcagtggctggtactggttattcctttccatgtttagtgcttccttcaggagctcttgcaaggcaggcctggtggtgacaaaatctccgagcatttgcttgtctgtaaaggattttatttctccttcacttatgaagcttagtttggctagatatgagattgtgggttgaaagttcttttctttaagaatatggaatattggcccccattctcttttgtccaaccagtgccaatgagatgaagcaggtgcctcagttggaaatgcagaaatcacccatcttctgcattgctcatgctgggagctgcagactggagtttttcctattcgtccatcttggaacctactgattttttaaatatatacagtttgtgtaagttccttcaccatcaaggtacagagcaatgacatcattcgaaaatactccctcatgctatccctttgtaatgatactctccctcaccctaaactatagcaaacactggtccttcatataaatggacttatacaagatataaccatttgaaactggcttcttccacttagcatagtgcctttgaggtttgtcaaaattgttgtgtgtcaattgtttgtttctgttgatcgttgaatggtattctacatatgcatataccacagtgtacctattcattgaaaatcaacttggttgtttccagtatttagcaattatgaatagagcatctataaacattcatatgggtttttgtatgaatctccatttttcatttctctaactctgtggtaaatccctgaaagcagagtttctgggtcacatggcaagtgtgtgcttaacttcccaagaaactgctaaaccattttccatagtggccataacattttgcatttccactagcaatgtatgagggttccagtcactctgctttctcaccagcacttggcatcgtaggtggttttggcttgagtcagtatagtaggcatgagatggcatcacattgtagctttgaattgcatttctgtagtggataatggtgttgaacactttttcatgtgcttaattgtcttcttttttttttttgagacacagtctcactctgtcgcccaggctggaatacagtggtgtgatctcagctcactgcatgctccacctcccaggttcaagtgattctcctgtctcagtctcccgagtagttggaactacaggtgcatgccatcacgcccagctatatatatatatatatatatatatatatattttttttttttttttttttttcagtagagacagggtttcaccgtgttagccaggatggtctccatctcctgacctcgtgagccccccacctcagcctcccaaagtgctgggattacaggtgcgacccaccgcacctggtgtcatgtgcttaattattttctatacatcctttctggtgaaaggtctgttgcctattttttaattgggttgtttgttttcttgctgttgagtcttgaaatagttctttatacctcttggatacaagtcctttgttgaatatgtgctttgaaaatatcattttctgtctatagtttatcttttaattctcttaacaaaactttttgcaaagcaagagttttaaattttaatgatgtttgatttgttgctttccttttaagaatgatgctttcagtgttatgtctaagaactctctgcctaatcccaggtcacagagatctcccacttatttgtttttaaagttttatattttacatttagtggtatgatccacttggagctcacttttgtataaggtatgaagatgtttgggaaaggagcaatttgaatgctcagtatatggtagacactgctttacaagctttgcatgaattaactcatttaattcttgctacagttccatgaagtagctattataatatctgccctttttcttataaaaggtaatgggcaaagagagattaggtaacttgttacggatacacattaaaaaacagggccaaggccgggtgcggtggctcacgcctgtaatcccagcactttgggaggctgaggcaggcagatcatgaggtcaggagattgagaccatcctggctaacaaggtgaaaccccgtctctagtaaaaatacaaaaaactagcgggtgtggtggcgggtgcctgtagtcccagctacttgggaggctgaggcaggagaatggcgtgaacctgggaggcggaggttgcagtgagccgagattgtgccactgcactccagcctgggcgacagagcgagactccatctcaaaaaaaaaaaacaaaaaaaaaccagagccaagatatgaactcaagcattttggtccagagtctgtgcccttcaccatgaactgaaactatcattaaaaattttcaaaatctcacctacagatacatctccttactcattacaatgttagttggcttttctctgtttatccttaattatacttcttaaagttttatctattttgttgatcttttcaaagaaccagactttagttttattaagctgctgttctattcttcctttctattttattaatttccgctttttatcttattaattgctctttctgcggggttgttttgttttgtttttttggtcaaccatgtgaatttttcatatccttttatgaaataaatggtatttcataaaaggattatgaaaaagtggagtatatttttagtctaggttaggggttacaaatttaaccatctccaagtattttttttaagagaattaaggttgcaaaaatttaaatgatgttacaacttcaacacaagttatattaaattttgatacagtgattgtagagaagctagttggtagaaatggaggaaagtagaaaaaacagtataggaaaacaagattaaattagaacattgtgaaattaattataatgggacatcaatgtgaattcatgccctttcagaagaaatgtatcttttctctctcaatcttaaaggatgcctaggagcagtttctttccccactccccacgtggaaagatcacacacatatgctgggacccagtgtctggctttaatagtatagctcaggaacagcaaccaagcccccttggagagtagttgatcccacatttggtgaagagaaaatcagggtatgcctgaacatcaagggtgtatggcacagagcagaaaggacaaaggcgccagctacagctccccctacacccatctcctggccaagttgtgacaattggaagatctcaaagaaggcaataattgttgttaatagagacaagttaggtctgtgggaaccaggagaacttcaggatgctcaagagagtagattacataaggtgtgccacgtgtgatttttccaataatatttacagaaaataatgtctttcaaacaataaaactacataaatattgcatttaaaataagttcaatagctgatctaagaatctaatgagtacaatccaggccttgacatgagaaattccacagtaattacccaactggcaattggtctgagggtttaaacatttttaccttggaaagactcaagagttggacaatcggaatgtgaaaggtatgcaagatcctgcaattggagatgggaaggtcttgagtgccaggaaaagcctattaaactcaaaggtctaagaagtgacttctaattttagagagaggtcttctaggaaaagactgcctcggaaagatggaaacctatgtgactggggaagtctaagacgaaagatgtggattaaaatcgtctttgacatggcaggcatctctctacttacagaatggggttcagtttaatagtgaagctcatgtctcaagaagtatcttgagattgttcccattcccagatctttagcccataacccaaatccacaacctcagcttgcctgatgtgataactcaggcaagctatcaaattttgtatcaaaatttaaagtctagtgtagcatgacctttaataatcattgcagttcttcatgtatgctttgattttagatgtttgataatttgatttactaaatttatcattttggatttttaggcttaaggggctcttagattaaaagtttggtttcctaaaggtttgaagtgtttgaaggaatcaggtacactaaaattattattgtaatttgaaatatttgagaaaatgcaaacttataaataacattaactaggaaagtatttaccaaatttcagttttgactaatgaaaaactgagtaagtaggtacttaaaatgttatgaaatactggataaacaaaatgtgatctctatgttcaaattcttaatataaaactatttttagatctacacattttaaaaatgtgattttgattaaaattcagctatgatcaactctcagtatttctaactgtgcacaaagtcaccctttgtcatttaaaatttactattctcagtcttttgagttgaatctttagtttgttttcagtctttatcatttcttaaataattcttttgggactacacatcttcctgttgagtgctgctttggccatgtctttcagccctccttgagataagtagggctatcattgtcatttatttcagaattgtttgtaatatcagtgttgattctttcagttctttgatgtggccatgccctctcactgagtggtttttgcatgtactattctctcttttcagaataccatccatgtaatccttttctttatctgcctaactcttacttacccttcagttcttggctcaggaagtacttcctcccagacagcttcccattccagaacaaaggcaaaagcaaaaacagaacaaactaaaatcaaaactgctaagcaatgaaaacttaatttcaaaatacagttaacccttgaacaacactgatttgaactgtgcatgtctacttaaatatgaatttctttcaacagatattttggaaaaatttttggagattagtgacaatttgaagaaactcagacaagccaagtaccctagaaatatcaataaaattaagaaaaagttaggtgtgtcataaatgcatgaaatatatgtagacactagactatttatttcgtcatttactaccataaggtatacacaaatctgtaataagaagttaaaatttttcaaaatttacacacacaggctgggacactgggccacacctgtaatcccagcactttgagaggccgaggtgggaagatcactttaggtcaggagttcgagacaagcctggccaacatggcaaaaccccatcttcaccaccagcaccaccaccaacaacaacaacaaacttccacacacaaacttagaccatgcatagtcacaattaagagaaatgtaaataaatgtaaaggtactctgttatgtcataactgcataaaattgactgtagtattactgtactattgtaatgatttcatagccacctcctatggtgattgtgttgagctcaagggttgtgagtacctgtttaaaaggccatgtgacgctaatcctctccaggtgaccagtttctctactaaattgtgaatagcagtaaaaagtcatctctcacagatcttatgtattttcataatgtttagtgtgatgccattaaccttgaataacaccacaggacccatttgaagtgccactagtgatactggtagtgctcccaagaagcagagaaaagtcctgatactacaagaaaaagttgaatttcttgctatgtacagtggattgaagtctgcagctgcgattgctgccacttcagacacgcgattcatcttgtaaacgggcaatgtaaactgacagtatggttagtagctgagcgtatccaagtcacatggcaccaaaatatgttagcaatgcaacatattggagacagggcatcaaggcatgttactggtgatgaatctgaacaggtctgcagcaacctcaattcttgcctcctcagaagaaagatttccaccgaggagcacaaggcagaaggagagaccaaggcaagttttagagcaggagtgaacgtttattaaaaagctttagagcaggattgaaaagaagtagagggcatttgttttttgttgtttgtttgttttgttgttgttttttttttttttttcttgagacggagtctcactctgtcgcccaggctggagtgcagtggcacgatgacagctcactgcaacctgtctcccgggctcaagcgattctcctgcctcagcctccctagtagctgggactacaggcatgcaccaccacggctggctaattagaagtagagtccacttggaagagggccacgtgggcaacttgagagatcaagagtgcagttttaccttttgactaggagttttatacgttggcacgcttctgggatcttgcattctttctctgcccattcttcccttggggtgggctgtctgcatgtgcagtggcctgccagcacttgggaggtcagaatgcacagtgtgtttactggagttgtattcatactcaggtcattcttcccttaccagtggaatgtccctggaagatcatatactccatcagttaagctccaacatttcgtctcttagtgctcatgcttaagcccacgtgcccaacacctgagattttatcaggaagctgctgatcaccagttttaggtgtttctatcaactgggagactgcctttccctggtggcagctgtgaccaattattattttagagagagagtgtgtgacaactgcctatcacctgatggtcacctgatagtcctggtgggtgggggcggggagctctctcctgctctgcttattcctgactagctacctactgtaacagtattgacaaatatgctgcagtgctgtaaatatattctctcttccgtatgatttttttgatagcattttcttttctctagcttactttattgtaagaatacagtgtgcagtacgcataacataaaaaatgtgtgttaattgaccatttatgttaccgataaggcttcctatcgatagtaggctatttattggtagttaagttttgggaggatcagatttatacatggatttttaactacatgaggggtcagcagccctaacccctgggttgttcaaaggtcaactgtagatctaactcatgatccttacacaacggttggtatatggaacaagtaggactcctgacttaattgaaatgcaactttgtctcctaccatccctttaactttaattcactgggtgtgtttctctcccctatccctggccccagtgatgaaaaccccagctcacatgacttttctgtttacactaagataatagccctgtaaaaatattccaaggccccagtgaagcttcttttcagaaattggaatgtacattcttatctaaaaatattaaagcttcaaacttagtgtaatgtcttcttcccttgcacctgcttcaggctgaaagcctgcacctgggaaatgaggctttcctagagcctggcttccttccctccctccctccatccctccctccatcccttgctcctttcttcctctccttatctcatttctccctttctctccttctttcttttctctccttcctcactccttctccctctttcttgcctctttcccttccttctctctttccctttctccttttctctccctcttttttctccttcctcccttttccctccctttctcccttccttcctctctccatttctccgtctttctcactcaccctttcttcatattactctttttctttcccttcccttccgttcctttctgtcccctcccttcccctccccttccttcctctccccttccttcccctcctctctccctctctacccttctctccctttccttcccctttcctcccctactctcccctccccctcccttcccttccctccccttttcccatttcccttcccttccctcccctactctcccctccccctcccttcccttccttccccttttcccatttcccttcccttccctcccctttccttctttcccttcccctcccttctttccttttccttcctccaccatgtctctctcttttttcatccatctctctctttcctatctgctcagatgcaactagataaggtgtttgctaacacactaatatttcttaaacatccttccatttcattaagtactattctaaaatagcatctacatagttttgttgtcttagatgatacaaatatactgttatcatcccatctttcttaggctgtgtttagtgttgtcaacaaccacctggggctgatcacccctgtatgtattcactcacactattcactcccattatttaagaaatatttattaactattatgttctcagcattgttctaattaccatgagtgcacgtgttcatctcttatttccttaggattaaattctaaaggtaaagcagcatcttgtaagattcgaatatttttaaaaggtttttgttacacacttaagatatgtaacaatttgtactcaatgggctagaaaggaatataaattcccattactctcttgtcaacactgggtctttctttttaatcacaaacaatttgaaaggctaaaaatgatgtcttattattttgatatgcatttttgattagtaatgagttgaatagttacttgcttaaaggctagaagtatgagggagtggtgtatgtgaaatgacttttcttacgttttgcctaatttccactggaatgttttggtttttaaatttattttaaatttttttataatttgaaaacattaggcttttgtcaggcatgtgtattacagttattttttttctcccaaacaatgtaatttgccctgcaatcttgtttatggtgttttatgacataaagacattttctttttaaatttcagatagtcacatagacactttacttactccaagaacagccatctccaggtcaagattatagagtaacacatgttttcttcttttactatttttcctcggttgtacctttgagtaattaagacaattggattttattttggatgtgagtatggggcaggggtttaactttattattttctaaatttttagccagctttttttcctcacttcatttattaaacaattcatcttttccccatggatttacaaatttgccttctaaatcttaaatcccaatatacacgtgggttcatttttggtacttctgttctattaatgcttgtgtattttgcagctagtaacaccctatttcaaatactagagccttagaacatttttgtatgtgatttgtaaacttctatttcctactctgtaaagtaaaatgtctcagctagtctcacagttttccaaatgtacgtcagaatcattttgtcaattttcaaaataatccattgagatttcagtgagattagctattacttgatgagggctgatatcattaacacagtgagacttacttttggctacatggcatgtttctatatttatttccattttaaatgtatctcaataaaactatggtcatggcatttaaaaaacttctttgtagatatttaatatttttattaaacaaagattttaaaaatatattttctaattagtccttgttgaaatgtgataaaattgttaaactgtgtttattgcttttaccatcgcccattttactgacttcttactagttttaataaattttagtttactccttgatttttctaggtgcttagcatccactaataagacttgttttcttgttactttttcttgtttaatgtgttgactgctgctttagaattctgtcatataatgttagtacaatgcatgtttcaccaaaaaaagaatattttgactggtgacttatgatggacattcccttaataaaaaatagatattacatttgatcacatttcttatgggcattttcacgtgagcattttgtgagcatttcaaatgagcattctgacttagacctattcacattacaaagttttatacactttctaatataggaaatgcattgttttcctggagtaaatttcagttggtcaaggaacatctcttaaaatctctgggaatgagccaaacttctctataaaatatgaaaacatgacaacaagtcattgtctgttttcttttttttttcttttcttttttttttttttttttttttgagatcgagtctagctctgtcacccaggctggagtgcagtggcacaatcttggctcactgcaacctccgcctcctgggttcaagcaattctctgcctcagtctcctgagtagctgggattacaggcacctgccaccacgcccagctaatttttgtgtgtttagtagagatggggtttcaccatctttgccaggctgggtttgaactcctgacctcgtgatccacctgccttggcctcccaaagtgctgggatgacaggcatgagccactgcaccctgccgtctgtttttctttgcgagtgtatcttgaggttctagagtatatgatttaattcctaacatctcagtgtttagaagctatgtgatcacaaggtaacattgtaaccagataatcaaacctagggagaggatgacaaaaatgcttgggcaggagcattcagaggatgtgtatttggttttgttaatattctatttcttacgttgagtacgtgtgggtttattctgttttattaaaaatttaaatatatttttaggttttaaaatgtattatggaatattagaaagtttgttttttatattacacctcctccttttctgatcatcagattattttcattgagaagatgcaatattctctaaaatattattgaaaatacaaaattgattacttttaaaaatctgttttatggcatcaactggtttcagggaaagaagggcgttgcccttgggttgttctccttattttgagctattgactgtggtcttaagtgggatgatttatccgtgtgcccaacttcacttgggaaggtgtgagttccagtggttgttggcagccgagatgggtagagaggcaggtgttcatttttgaatatgctacttttaggtaaaaaggcaaaagaaaagtttgtattttgccaggttaggcttctagtcaattgcgaggtgtaggcaggaagcttctgtgagttaaggaagctgtgcagccaggaccacacagctgtggctaatgcctccatttgtgtgtttgctgtgaccaccgtgagctagcaggggtggcctgcccctttcttatctggcatgacagctcacgttagcagcccccggggatgcagctcctctgattagcacgcactctcctacaaacgaaggtggtggccagtgcatcaggacgctgggtcacattcctccatctttcataagatcgagggctggccactgcctgaagatccaggtaggagcctcacctgcagtgctgcagctcgtaggtcacagattccgagtgctctggactgtagagcgtgaggaggtcaacaggcagagagaggtgagctcggctatgacaaatgcttcctttctgcttgctgagctgactgagtcacacacctttctctgactggcatggccacccttatcacctgttctggcaacttccttgtggggggaacacaacgtcctcacctactgcagatgggaggggccgcctgggctagagttctgtgtccttctgggcccatagtctctttttcaattgcggtaaaatccacataacatagaacttatcattttaactatatatatatatatataactatatatataaaatataaatataactatatatataaaatataaatataactatataaatataaatatatatatatatattttttttttttttttgagatggagtctcgctctgttgcccaggctggagtgcaatggcgcgatctcggctcattgcaacctccgcctcctgggttcatgccattctcctgcctcagcctccggagtagctagaactacaggtgcatgccgcaactcctggctaattttttgtattttagtagaggcggggtttcaccgtattgcccaggctggtctccatctcctgagctcaggtaatccacccgcgtcagcctcccaaagtgcttggattacaggtataagccaccacgcctggcccattttaactattttgaagtatgtatttcagtagcattaagtacactcacattgtcatgcaaccatcatcactatttatctccagaactttttttttttaatcttccaaaactaaaactctattatccattgaacaataacttcccagttccttgctcccagtcccgtggtaacctctaatctactctctgtctctatgaattcgaaaactgtagataccttacgagtagaatcaaacagtatttgtccttttgtgactggcttaatttacttaacatgaagtcttgtaaggctcacctatgttgtagcgtatgtcagaacttcttttctttttttttttttcttttttttttttcagatgaagtcttgctctgttgcccaggctggagtgcagtggcgcaatctctgctcactgcaagctccgtctcccgggttcacgccattctcctgcctcagcctcccgagtagctgggactacaggcacccaccaccatgcccagctaattttttgtatttttagcagagatggggtttcaccgtgttagtcaggatggtctcgatctcctgacctcgtgatctgcctgcctcagcctcccaaagtgctgggattacaagcgtgagccaccgcgcccagccgaatttcttttctttttaaggttaagtaatagttcattgtatgtacagacaatactgtttactcattcatctattgatgaagattgacctgtagtctttttaaggagataagatttgcctgcatcttcagtctctactgcactgagcttgaagacatcctggaattattctaggacagtagttctcaagcttcacggtgcaccagaatcccctggagagcttgtgaaaatacaaattgccgggccctgacctcagagtttctgattcagtagctctggggtggggcctgggaatttccatttctaacaagtttccaggtggtactgatgctgctggtctaggtaccacaccgtgagaactactgctctaggaattcagttcatgtattttcctagagctatgtaccgcatatgataaagtagatgcccactcacatactcttctgggggatctagccacgccagtccctgttgccttcaatgataaggggctgacctgaaagacatctatccgtaaactggccactacttttgacttgtgtgaccccactcaaaagtgagctaggccaatgcctgaagaatatgaatgtggtgacatggaggaaagttggactgtggaccaggcagagttggggttgatatgaccagccttgtgctgaagccaacgaagtcacgggtggaggaaacagagtggacacccaccaagaagcagagatctcagtgaccaacccttttattaagacttcctctatccttgctgcttcctccctgcctgctgagcccatccctgctgccagaaagaattggcccctaggcttgaatttcagtgaagccatgaagagaaaatgcaccatgaaattatatggctcctgcaaaagaggttgccatctgctttttccttaggcctttcccctgtacacagtgtattaaaccattatggtctggagctgtctccccttcctgtaatattgtacacattagaaagaaaatagtccttatttaaacaaaacagaattcaggattcgaggctctagtaaatttcccaaggcatttgtggattctctaccattttctaaatattagtattaataatctgttaatcgtttttccaatttcccttgtcccagttttgggatggaaatgtattgccttttgctgaatatctataggtttttctgtgtatataaaagcttatacaccataatttgcttcaaccaatacatgattttaatgtcgctttttctcaccttattctttaccctcgcatttctgaactttgggggagatgcgattttcttttttcttgctgaataagacaaaaaataacaattgagataataggcaaaaaccaagcaaattaaaccttgtaaattctattttatgttctgaggaagcccagcagggattaaacatcgagaaaacaaggagatattttgattccatttttgaaaatgaacttttaacttgccctttggaaaggaccacattatctttaaacaaaaggaatcccatgttacaaggcacattttcatctccgtccttttcactgtttccagacacaagaagtgtcccctggcactgagcatcctgttctcccaaggggtactgatccaccctctctaaattttcatggataaaaggaaatatgtgactgtctaggagtggacacctgatatttctttttttttatttgttgttgttgttgcttcttttacatatatatatattattatactttaagttctagggtacatgtgcacaatgtgcaggtttgttacatatgtatacatgtgccatgttggtgtgctgcacccattaactcgtcatttacattaggtatatctcctaatgctatatttcttaaattatctgctctgtgtttgacctggcaggggtttctcaatgtgtaccacaagatcatcaccttattcccctatctcgagcatgagaaatgacattgattttttttctggtttctagaagtcagtttgtttcataaaggggacacaggcactgattgctcaggtgcttcctcttccttccacgtattgatttttgttttttcattcttccagtgatttgaggattgggtcgggggtagatgttatgtttctctactttcagcagttgagatggattttctgagggagtgtttgtgtccctgttcggcactgccaggctcaggtgaacagagaggggaagaggtaaatttgcggcggctcactttcaccaggctgggtttggtgggatgtggcttctgttgtgggcagtcgtccaggctcacaaagaggaggaggctgttttccagcacactcctctcttctgagttgagtgtgagttgggagcatgtgcctgcccctcggtccgaccctcggaagatgccggtgtcaggtgcattcctggaagatgctcccaggccaacacttgcttcctcccttcctgttttagatgtcctaagttggggtggtgttctgagcatcatctggctgtagatttgtgagcccaccttgcagtctctctccactgctctctctcgtggagaatttccttaaggactgaaacctatagataattatttcccctggttctgagctgatctagcttttcctttgaccttttcaataggtatttggaaaaggcgatggccagtgagccagggtggctgtgttgaatgggaaatctctgatctgactgggtttctcatttgttctttaccaaatcaagactcgtctctagaaatcagcttttaaaaagcaacagttatctctctctggaccccatcatgtcagatttggttctcaaaatggaaagatccagaatcctgtttatactgtatttcaaagatgtgactcccttttggaaatccttcttgatgcctgcttcctgtttttttttttgttttgttttttttgtttttttttgtttttttttttttgagacggagtctcgctctgtcgcccaggctggagtgcagtggcgggatctcggctcactgcaagctccgcctcccgggttcacgccattctcctgcctcagcctcccaagtagctgggactacaggcgcccgccactacgcccggctaattttttgtatttttagtagagacggggtttcaccgttttagccgggatggtctcgatctcctgacctcgtgatccgcccgcctcggcctcccaaagtgctgggattacaggcgtgagccaccgcgcccggccgcctgcttcctgtttgagggatgctgccagcccttcctcatttctcagctgagctggctgacagcagctgagctcaatgcttggacaaagcctcttaactcagatcaccaactgcatcctgtctatgaggttctctcttgatttctgaggatctgggtggctagagaactgatcgcccagaatccatcacaatctacacaatattgggataatgaattaggcagatattcattcatccaatgtgtatttactgcctgcctatgatgcactgggcattattctaggtcactgattctcagacttggagtaactgggtatattaatcagggttctccagagagagagaaccaatcgtatggatatatgcaaatagagagattgattataaagagttggcttttgtgattttggagactgcatgtccgaaatttgcagggcaggccaataggtttgtgacccaggaagggttgatgttgccatcttgcatctgaagacagtctggaggtggaattctttctttcttgaaggatcttagtctttgctcttaaggcgctcaacagactgggtgaggtccactcacactgcggagggccatctgctttactcaaacctactgacttaaatgttcatctcatctaaaaaaccaacaacatccagactagtgtttgaccaaacaactggacaccatagcctcgctaatgtgacacatgaaattaaccactatgccaggagagctataaaaactttaatgcctgagtccaggccccagggattcttgtttaataggccttgggtgcagcctgggtattggggtttttcaacagtccgcagtgattttaatgttctgcaaagttgaagaactgctcttctaagcactggggttacaagagcaaacaaaagagaaaaatgtctgcttgcatggagtttccatttagtggtggaagatagaggatgcacaagtcaacagacacttatcctgtgaggtggtgcagtgtggggtgaaggaaaacaaaagcaggcgaggaaatcaacaaggacaggtgcttttctagattaggtggcatgggaggcctctttgaggtgagccccagggagagaactgagggagctgagctactactaacccagtattggggagtcagaggaactgtttacttctgttacacagaaatattaaggaacctatatttctgcacgatatgaggtttaagcaggaaagaaaatttcccacccaaagggatttaaaactttctcttctacacacacacacacacacacacacacacacacacacacagagcacattttgaaggaacagcagccacctgcagccaccagacactcagggagaggccaggggaagcgaggcagggggttgtgtgttgccacccacagccagatgggcgggcatgcgtgggaggggcacagccctccacggaagccagtctgcagggatctaggaatgaaaggctgcacagttcgcaagtagtcaaggcaaaaacgaacacccagagttctgcctcacgtttttaggggtttggaatagagagggccgatctgccatcaggaccccaggtctgctaaaacttgggggccatgaagcgagaaacaggcatctcagtgtagctggtacaaataggaccacagaaaaattataaaatagaatctgatttcagttttttagacacagtcttttggtattgagaagaaatagaagatgactgtaaaaacttagaatgtatgtatatgacatatagtgtatatattatatatgaaataaagtatatgatatatactttattatatatcatatatgattatatagagtgtatactagagtatatattatgcatatatgattatatatagtacatatatgattatatatagtatatattatgcatagtatgtaccatatatactttatataaaaatagtgttttattctattctaatatttcttagaatagttttagatttacggaaaaaaattacaaagatagtataaagagttcccaaattccctataccgagtttctcctattattagcatcttacattagtgcaatacatttgttacaattaatgagccaataccgacacagatttattcactcaagtccatacttgattcggattttctaggcttatctaatgtctttttttctggtccaggacccacattacattacacattacacaagcatttcatcatcctgtggcccacaatctgagttagcagtaggggctgttggcattgtctgtttctgagggaggcaggagtcgtacttcacacatgtaccctgtcgactgtcactcaaataacaagcagcctaagtgagcctctggcaagggctggaccagcgatgtctccaagaaccctgtgatttagtgactagcttgaaagggcgggctctctgtctgctggggacgtttatgagtcagctttgtgatgccaagtttgggaggcaacctcgcagccaggggaccaggagttgaacccaggctatcagctccatttacctgcagggctttaaacgatgtgtcaaacatctctgagccagactcagatagttttaccagttttagccatctcacataagaatattgtatcatggggatcatgaggattttctaaaaacaagaaatgtaaagaagcttggctcaaggtcaaggccaggagaccttggctctttttgcccataagcctaacaatggcttctggtctcttagaagtaggagagaggtgaatgaaagatccttctccttatatgctgaataaattccttttttgttgtttttttttcttttgtttttgtttttgtttttttgtgagacagaatctcgctttgttgcccaggctggagtgcagtggcatgatcttggctcactgcaacctctgcctcccaggttcaagcgattctcctgcctcagcctcctgagtagctgagattacaggtgcatgccaccatgcccagctaatttttgtatttttagtagagacagggttttaccatgttggtcaggcaggtcttgaacctcatgatccacctgcctcggcctcccaaagtgctgggattacaggtgtgagccactgcgcccagccttgagcaaattctttcaacatgcattcaacagatacatcttcagcacttactgtccaccaggctcaccgctgggccctgagaacagaggggaagagaagccatacttcctgtgctcatggagttcgcagtaactgggactctcaagttctgatgtaacatggagggggaggatttcagcttgagcatctttcaggatagctatcacctcatcacttgtacatctgtttaaagagatttaaatttgggactgtatatttagtgttaagacccactttattctaaaaagcttgccaggatgattaactaaaaaatcccctaaaaatctgtagggacaataattttggttgggataagtatttcctagatccctaagaattaagttttcattgacttgtctgtcttggcctaaagacaatatatcaaacaatatattgtatatcaacaatatatcaaaatatttctaatgtttgtattgtctttgactaaagtcatttttgtctttcgtaaaggggaggttatttgccttcctttttgccaaactaagagatcaagaagactggagagagcctcaggccttagactgaccctgggcaagttacctagattctttcagtttctatttctttctttattttaaatgagtagagcaatttccttgacccaacatgtcagctttggtgtaaagtaaataaaccgttgcccacaaatgcctcggcccactgctttgcatacagtaggtgctcagtaaatgggagctcttcttgtcattcctgggtccaaacttcctgctttgtgaaatggcaatactgccacctaccttgtaggtacaattaaatggcttgaaataaggtcatctgctgggctgaatcctgggaaagatttaggctctgcccaagggggccacttggagaagagagcaggtctcagaagaaggaggttgggcatagcttcaaatacccatctagtgcccagctgaaggatgtgtatgcctgcaccaggggatctgtaggccgtttggggatgcatgctacgaactacaaagaaaaccaggaggcaaagaggtggcttaaacaccttgtagggccagaggaaagaaaaaacagattaaccggtgccaggcaagaaagggcttccagcgtccattatctgttcttcctttccctacttcaagcttgaaaagagcagagatagctgagtgggaggaaggaattaatagacttgagaaaaggcctacctcctctcgccattaaagactgtaacaggtatagactgggggatgggagaggatttatcgtcaagtaaaattcagaattttgattattcaaaaaatctggaggttttaactactgaaatgaggactatgttttgtgatcagagataactttgttttgtgatcagagataacttgaaagtctttttcatcatctgaaagtgaccaggtaagccatgggagctgcccttgtttctatccagggagtaaacaggagctaacctcatggaatgtaggagagagattatttttgttttgctgattgtttgtttctaggtactaggggtttttcttttcttttcttttcttttcttttcttttcttttcttttctttctttctttcttttttttttaattttgagaactagattaccagcacaccactgcttaaaactatcccaagccagaaactttggtggtatgtcaacatttcatggagaaaaagtactgtgtgtgtgaactgagacattttattagacattttgtggtataagcatctctgctgtggcttctatctaggtagaaggtggaagcattttacttgctttccagagccccgtccagctgtcctgctactgagggtgctgggagaatgatggcaagagtaaccagcaaacagctgccccttaaagaggctggggagagattggctgggtgcagtggtagaagctagtcttcctgggctttaggatgtcaggagccatatgaggatggggatgagattgaagctgcatgggacaggccagccgggactgggttgtgggaccaggtaagactcaccttggacgctctcagaaatctttgagttacagagataagtatttgtaacagactagaattcgcacgtggagtagaaataccttaacgctgggggcattgagttgttaatgttaacgccactctacttatctatatatggaggagccttggggacactggattgcagtaatgatgtacataaagtgtccagtccagagtcccgtacatagtaaggactgagtaaaacagttttcttttcaccttgacctttctcatcatgcatctattagctatgccagtattgaaggtaaacattagcaagagggaagagttaatattgccctgtttaatgccatgtattgggattacacccctcagtagatatttttcttggaaaccaagcttagtaatagcttcaaatgatcatctcttacatccataacttcttcacatggtgtctagtccatggtaggtactcaataaatagttgttgaatgtagttgatacaggttctggaggagtttaacaaacctaaagtgcacatactggttgagttctgacaaggaaaccatagaatctcagagaaaggttctcatctaattccccattccgttctctattctgtggtttgcattacctgctccccctcatcctagatgtgctcccccgatcctggaggttactctgcctggacatactgataccagtggacacaccatgtgggaagtagtctattctgcttttggacaaagcttcccgtgcaatttcaatgccatgtaaggaaagcatagtgtccttgtatctttcatccaaagacagagacataattggtctgaatcctgcttgttccttataaaatatattttgggaaactcaggcaatttatttcaggaaaatctgatggggaggtttaaccaagtgtccagtaagctgaactgcaattgtgaattattaaaggatgtccttttattaaaaaagaagtggtcaggcatggtggctcatgcctataatcccagcactttgggaggccaaggcaggtgaatcacctgaggtcaggggtttgaaaccaccagcctggcctacattgtgaaacccaatctcttctaaaaatacaaaattagccaagcgtggtagcacttgcctgtaatcccagctacttgggaggctgaggcaggagaatcacttgaacccgggaggcggaggttgcagtgagctgaaatcacgctgttgtactgcagcctgggcaacaagagtgaaactgtcttaaaacaaaaacaaaacaaaacaaaataacaacaacaaaaaaacagtaagtgcacttagaatggatccaaaaggaaacctacttccagaattgactcgggtagaatggcaacgagtatcatgtcttaggaaaatgccggggacttacaactcaaggggcattgaaaaaagaaaatatcgggtcttccctgcttgcctgcagtatagtatgcagcctggtaagagctgagttggccaggatggctcaagagcttcctaccctactttaggcacctagcggaagtctagcaaggctgcaggtaggggggattccagagaaggaatgaacatttcatcagctgaggtcgtgaaacaacctcacagagagcagccacaaaaattctctaggagtgagcaggggtgcaaaatccttgtcaatccaggcagacaattggtagcagaaagtcatgggccatagtagatcactaaataaaattttctaaaaatataaaagatattaaaaagatatataactggatcactagccagggattactaaccagcagaacaaggcaggacccatagttctggagacacaagaatacaaaggctttggttcattgagcaaaggcgcaaatgggacctaggatagggaggagggagtagacctcaggaatgaagcagaaactcagtgtcaaaagaaaaatgtggccgggcgcagtggctcacgcctgtaatcccagagctttgggaggctgaggtgggtggatcatgaggtcaggagatcgagaccagcctggccaacatagtaaaaccccgtctccactaaaaatgccaaaattagctgggcatggtggcatgtgcctttagtcccagctacttgggaggctgaggcaggagaatcacttgaacctgggagagggaggttgcagtgagccaagatccactgcactccagcctcacgacagaatgagactccgcctcaaaaaaaaaaaaagaaaaagaaaagaaaaaccttagccaaattaagtttcacagagtttaattcagcaatgaaggattcacgaatcaggcagtcttcagagccagagtaggctcagggactccagcacagccacgtggtggaagatttatggacagaaaaagggaagtgatgtgcagaaaatggaagtgaggtacagaaacagttggattggttatagctctgtgttgccttagttgaacaattggccaccttttattggctaaaacttttgtgattggcacaaaaggaggctatagtctgtatacaactccatttaggttatagttcacaatgtacatagaaacctttaggcagaacttaaaataggtaaggaggcagttttgagccaaacttcatttaacaccagttagcaagtcaggaacacagaggtttgcttagagatacagggcatcagacaagaagtgcttcaaatcccccctcctaaagccggaacagccctagaaactaagggggcactttctttactagacgtggccaggtgagcaaggactttatcccacactctggccaccttcagcatatatctttaaagaaaaaaacctcaggatagagcattttacaggtttgttttgattgatagaatattttcaagggggcgtaagttattggctttatacattttgtagtttaaaggcagtaaggaagaggaacttttgaaataattttttcttcaagaaacacattcttatttcagaaaatttagaaaaatgagaaaatacttagagaaaagtctttttacttcgaaaagcatacacatactctcatacataaatactgagcttcttaatgtgtgtccacttggagtatatgcattctgctttatttaattattattacttattaagcatttataagaccacataaaatagaaagcatagtggctgtatagtattttaatatatggatgtaatataaatatttaatttagggtgtttttccctgttcaccaatatcatattactacaattggtggctttgattgtttttgtagaatactatttgaaattggaattagtaggtcaaaagtcatattttgtttgtttgtttgttttttgtttttgagatgcagtcttgctctgtcacccaggctggagtgcagtggcataatcttggctcactgcaagctctgcctcctgggttcacgccattctcctgcttcagcctcccgagtagctgggactacaggcgcctgccaccacgcccggctaattttttgtatttttagtggagacagggtttcactgtgttagccagtatggcctcgatctcctgacctcatgatccacctgcctcggcctcccaaagtgctgggattacaggcgtgagccaccatacctggccaaaaatcatatttttaaaactctaaacatgttttgccaaattgtttttcagaagctataccagtttacatcatatcctttctgacattgaatgtgaccattaaaaaaaatagtctatttaacaggtgaaagacggtattttattgccttattttgcattttttcactagaaagaataaattcttcctgcattagtgtttgtattaatattactaataaataaatacatgagtttatctgaaccaagctatgtcttagcaggatgtaagcttaagaccatcggttacaagaaataatcgtggagtctttgtgtatgaaaagccccctttttacagggatggaaatgtttggaatgacgttacaaataagatgctgtttttctaaacatggcacactcttgcttagtgctggcaaatgctaggtgggtgattgagcgggaaacttgctgagctcagcatcctcttatcttcttcctcttcctgaccacccctaccctcattttagatcttaatctattcagttttacagatgctgagatcgctcccaatccgcccacacatctggttagattcgtatttccctggctggcttgtattttaccagcatctgtcaaccctatttacttcttaattgttctttgggcatttggaggaaaagcctgcctggggatctacacactcacatgaaaactgtgcaaacgagtcacaggctgggacacctttagaaagagtggttaaagttgattttttattatttattgttgagctgttgagtcatcataaaatcaacgtccagctgatggctgtctttggtcttgtgcagtcagctgtccccgtggtgcagtgcatgattcctgctggggcccaggcatttgaagaaataaaaaaaaaaaggaaagccaccaggtccccctgaggccattggcttgttttatgatgcaaacacctgtctcattttatattgactgccctgtgacctaaaaacaaaagcagaatttgtaacacctccaggtgcaatagcacccacaggatctaaatagagcaccagagagaaagcagctataagtcaccaaagattagctttgatacccagtgagtggaaaatacgattctctccagagacgggtgtgggcactgttcttatttaacctttttttccccaaataaatgatccagacaaacaggcaccatgaaatctttaaattggcagatggcacaaaattatccagaaagtgccttgccacactgatggtcataaatggcaggaagagttttggagtttgagtgaatgggcaggaatgtggcagatgagtttcagtgagatgaagtatctggtaatgaactaaggcaaaaataattactggggacagagaatgggctgtggggtattggttacaatctgaaaaagaggtctggcaaaattgggttgggttttagggataatctactatgtgctgtcagaactactatgaaaatattgtgtggcaccaaatgaatatcggtgacaagttggagatcttctaccattgtccacaagatctgtaattcttatttttttcttttttttttactttcttttcttaaattatttatttatttatttatttatttatttatttatttatttattttatttttgagacagagtctcgctctgtcacccaggctgaagtgcagtggcatgatcttggctcactgcaacctccgcctcctgggcttaagcgattctcctgcctcagccacctgaatagctgggattacaggtgtccgccaccgcgctcggctaatttttgtatttttttttttttagtagagatggggtttcaccatgttggccaggctggtcttgaactcctgaccttaggtgatccacctgccttggcctcccaaagtgctgggattacaggcgtgagccagcgcgcccagcctaagatctgcaagtctatagaggttttatttgtctcattttaatgatgacctaattatcaggaccttctggtgatcttactctttcctgaatcagaatttggttcacatctgtgcttccgtctgtttccaaattgcattgtacccaaatgtcctcaaccagtcagagatatagatcaggcctctgcattgagcacggagctggctttctcccctctttgtttcttaggtcttggatggctatttcttagaccagtactatctgactgcttttcttgcctcggttgtcctcccaaagcctgacctctccttacctgtgtaataacctgatctttctcccagactgagtctctgatctatggggtttggcagagctccctcggctacgcggtctcctattgctgtcttcttcctgcctccatgcctcaaggagcagcaaggtagcaggagaaggtaaacacaatagttaagcgatgtagtggacatttgttggttacttttccacagccattgcctcttctcctttttccattgggacctcaaattttaaagcactatgacttggggtgagattgagcccatcctcagctctaaggtgagacctaattggcttaatacaattcagctccttcattctattccccgaccattgtctttgattcagtggtgaacgtctcatttcaggccaagaagccaaatggagacatttactagaacttctagtaaagatatttctctctttttttctcaaaagatctataattttctttctttttttttttcttttagacagactctcgctctgtcgtccaggctagagtgcagtggtgcaatctcggctcactgcagcctctgcctcccaggttcaagtgattctcctgcctcagcctcccaagtagctgggattaccggtgcacgccaccacacctggctaatttttgtatttttagtagagacggggtttcaccatgttgaccaggctagtctcaaactcctgacctcaagtgatccacccgccttggcttcccaaagtgctgagattacaggcgtgagccactgcacccagccaagatctgtaattttctgtccccatatccccactctccccatgagagagaagccagcttttccgggagacaggttgaaagcagagaagagagagaaagaaatggaaactaggatgtaggtgctagcattgagttaccggatcaagccttacctgaactctgcctcctcaggttgcatgggccatatatttattatatctatttcataaactttctagccagtacagttcagtacccatagaaggaacaaaggtatacatgttgaatctctaaaattttccagagttaaacatttaggccatttagcttagcattggataagaattagataagacagtcaggagatgagggcttatgcaagctgatgctctgaaccttttacctctgtgtgttccctggcaaaacttcatctagcaagaccatttatctggcaccaatgctggttctaacaccccctccatgttcaagcaaacctatgggtttcagcctagactacgagagagaaacattgatactcaaacacaaatgcagtttaacaacctggaggctattggatgattgtcaaatttagaccctgctcaaatttcttctttggtgaagaatgcatggagcctgaagagtttttaaagtttggcttctgtttcacgctaaccaaatgcatctctttagcagagaggcaacttcctttgaatcccacaaggtattttggacactgaacaggctcacgaacccatctcatgagcaaagtgtaaatgaacccagaaacaccaagcttatgtttttcttaaaataaacaagcataaacaatttacagaaaaaaattctcaggggcaaaccacagttggatgttagcagatttcaaaacaattgaaaaatgattgaacacttcttgcggatcccaagacatctgcaaaattgctcaacatttttgtggcctcctggatcttcaagacccccaagtatgcatttatctacccagacaaatccccagcccactcagtgcaagtaaactcatcaaggaagcattagggtgactgaatggcaattcaccgggcaacctgttatgtttctggcccatgtcttcttgtaagtcttcttatttatctttttccatcatcaggaatgaccttgagcagatccttttctgtcttacacttagaattctctgaggaaagaaatgctaatacacccttcaatagcctattctatttttccataaacctgatgctcccaggaggttttcttccacattacaatttcttaaaatcccatttgcttgctgggtgcggtggctcatgcctataatcccagcactttgggaggccgaggtgggcagatcacgaggtcaggagctcaagaccagcctgaagcctgatcaacatggtgaaaccccgtctctactaaaaatacaaaaattagccaggcttggtggcgtgcgcctgtaatcccagctactcgggaggctgaggcaggagaatcgcctgaacccaggaggcagaggttgcagtgagccaagatcatgccactgcattccagcctgcgagatagggtgagactctgtctctaaataaataaataaataaataaataaataaataaataaaataaaaaataaaaaaaatcccatttactctttttcttcatcataattctttgaatatttggaagtggtgtttaggaaaaccttctccttttggaattaagtaatcatcacttttcttgcagttctgattttttgacactgtaactatcttcccagttcccactatctttgctccctctctggcgattcctatggggcagacaatgaatgaccagccacaagatactgacacctacctatttcctctctgagtttcagctttagggagatttctggaaattaccaaggtaacttcttgggctcaccctttccctgcaggcttgggagaaatcttaaattagtttagttttattgccatacttggtataactcagttaaagcaatcttattcatggaaacatctcacagtaggttggatgttgatttaactaaaatactacatacaaatcagggaaataagacaactgaaaggcttgaattgtatttggcattctttaatagttcccaggtctcataaaaaccatgagggaggtggcaggatgaagaaattgagctgttaaatcagacgaaagccgaatgtggaagaggcctcatccttggaagggagtttcttgtctattgctgacccccatgaggaagagagaaaaacatttcatttactcttttgaaaagaacataacactggaaaactcttaatattagatgctgacaaccagctatttcctgtcatatacactagtctatacattttttttaagggaaaacaatttactagttcaaaagtagacatgttaatcatggggaacattttgaaaaaaatggaagaaatgaaaacaagaaaattaaaaatttttcataatcttatcacatggagacatataatagttttttataagtctctagtgcttgatttttattatgattctttttctttctctcaaaaactaaaaattgaaatcatgctgaatatattgtgttgtaacttacttctttcatgataagaattattcttaaacagaatattatttgatgtctgagttataaagttagatcatatctctaaaagtttttgtttttttttttctggctaccataaatcatgctttcataaacaaacatctctggaactaaatctttatgccgagccaacatcttttctatttctatgtatttcgatgtatttctagaagttaaattactgggtcaaggagatgcaaaattgtagagcttttaaatataaatctccaggaagactaaacccaccagcaaggtataaatgtttcatcacacaaattcagtatattttaattaaaatttctaatttatagataaaataatagctcatgggttttatttgattattaaggagttgagtattttcttttttttttttgagatggagtctcgctctgtcacccaggcagtgcacgatcttggctcactgccagctctgcctcctgggttcatgccagtctcctgcctcagcctcccaggtagctgggactacaggtgcccgccaccacgcccggctaatttttttgtatttttagtaaagacatggtttcaccgtgttagccagggtggtctcaatctcctgacctcgtgatccacctgccccgggctcccaaagtgctgggattacaggcttaagccaccgcgcccagccaagagttgaatattttcaagtaaaatattgccatttacattcatgtgctttgcctggttatcaatagtaagacatacttaaaaaaaatttgttaatttaatttttgcatagtaagtatagcaattctatgctttctctcatatgttgaaaacattcattttaactgtagattggtgcttatttttgtataataccattattaagctataaatgatactattaattaaactacaatactattaactagactacatgtatattttcttggactgatctgtatttggagatgtattttgacaatattttaaatttcttcttcagcatttttacttggttagtcaattttaataactttcacttttatagaaaatcattcattttattcagatttcaaaataattaatattgcatttttgttgttgttgtttgtgttgtttttggagaaggagtcttgctctgtcacccatgctggagtgcagtggcgcgatcttggcccactgcaacctctgcctcccgggttgaagtgattctcctgcctcagccttccaagtagctgggactacaggtgcatgccactatgctcgactagtttttgtatttttagtagagatggggtttcaccatgttgtctaggctggtctcgaactcctgagctcaagcgatctgcctgccttggcctcccaaagtgctggaatacagttttaacaattactctataaaaacatttgcagtctcctttatgtctgtcgtgtatgccctttcttaattctgatagtgaaattgatttccttgactttggcttggagtttgtccattttattagtccccttaaggaatcagctgcagaattttaagaaatctgttctgggattttttttaattatgattttttggtcttactcatttattagttaatatttactgctttcttcctgcttgtcttcttgagttattcttctattctctcaagtccattttagtatcagatgttggagcctccttgccccatacacctttcattgctgggccctcccctaacagctcacacctgcattttctttcctttttttttttctaaaaagtcaccttttcaatgaagcctttccagccattttatctaaaatgtcaataaatcccttctcctgtctccagattctccccctgacttcctggttttatttctctcattagcacttaatcactaaatatgcaatatactttacatatttatcttatttattttttgtctcttccaccagcctataagctccacgagagcagagattttaatctatcttcttgttcactgcttttctccccagcttttagaagaagtgcccagtttatagtaggtgctcaataaaaatttgttcactgaatgaatgaatgaaagaaaccatgacacctcaaggcaggaagctttgaatagtagagctcaaagagtcagctccatttatgacaatcactttcttaagttcttcagttttactgtacattttacctttctcatgtcttgtcttagagtcttaaagttgttttcatggctggcgggtgatagtgagatatgagagaacctggggtcatgaaacatgaagctcttcttgccatagccacccttctacaagggtataggatacacatgtacaggagacaaggccacaaggccatactctttttttttttttttttccaaaagaaaacagggtcttgctctgttgtctaggctggagtgcagtggtgcgatctcggctcactgcagccttgacctcctgggtactagtgatcctcccatttcagcctcccaaatagctgggactacagatgcatgccaccatgcccagctaatttctaaaacattttttgtagagacgaggtctccctatattgcccaggctggtcttgaattcccgggctcaagagatcctcctgccactgcctcccgaagtgttgggattacaggtgtgagccaccatgcccggcgcaagtccatactcttgattcaaatgatgattgtgccccagacccagtgaggtaccctggaccatggggaaaacttttttgaccaggaaaaggggggcagcttttccttatctcttaccctaccctggaatcttagtcttttttgtatttccctcctctaatcgttcagaaacagtcccttccttgaaggcacacctgccagtgagaagagcctttgcctgaaatgcctaggcctgaacataggtccaaagtaagaattctcatcccagatccctttgacctcttcagccacgtagaaaagacttccaagggaccatgacaagaaggctcagaactttagccactcttctctataccccaaatctctcttcctatcactaactttctgtgcccacaaatgtgaggactggtgaataaagaggagcaggcacaaaggggaccttgaacaacctccccctccatagtctaagagccacagagtcctgtaaacagggaattgtagatctgggagggaagcattacttctgagaggaagcccgtttcgttatcagacagctgtcctccttgtagataggtaaaatgagtttgccagaaagttctacatttcctttctgatggaactcccgtgagtcaaacaagccaaatatactcattcagcaagacttttacttgtatagttctgtttaaaagggaatgcccaggattagacaaagtaccccacacacatcttgaacagagcagattgctagcttatatataatatgaacagtttttccagagtggaaaagacaatgtggcaaaggaagactctggaattcatatcctcgcaagggaccatttgtccccaaggggattttatgtggtaactgttttgactagttgaaaaccattatatggatctgctcattgtcttttcatgatggatgaggggtcccggaggtagatttttgctttctatgaagatgtgctttccaagaaattggactgttaaacaatgaacagggtgactatgtaagaacagagtgttttattcaaacagaatctgtttgaccatctcttcagtctcctgtagagagtttcatgcatgggatgagtttggactaggtggtctctgaattcttttatatctaattctttctccttttttatatttagaaataaacccagactgttaggagaaagcaaagatcagagaagcatgaacatcaaggcagttctgtagccatttatttcagcccagcaggctggggtatgacaaggtggctacaccctgcccacttctactttctggggccctgatatgcatggcgggcacctgaaaaatgggcaaaaccatagtccctccgtcctacaacacttgtacaactcccactgaagactttcctgctacgttggaacctagagccagtggccgggcgtggcggctcacacctgtaatcccagcaattcgggaggccgaggcaggtggatcacttgcggtcaggagttcgagaccatcctggccaacatggataaaccccatctctactaaaaatacaaaaattagctgggcgtggttatgcatgcctgtaatctcagctacttgggaggctaagacaagagaatagcttgaaccagggagtcggaggttgcagtgagttgagatcacaccactgcactccagcctggggaaagagcaagattccacctcaaaaaaaagaaaaaaaaaaaaaaagaacctacagctggaaactgaattgtttacccaattatattagtcttctggggctgctgtaataaaacgccacaaactgggtggcttagagcaacataatttattctctcacagttctgaagcccagaagtcctacatcaaggtattactgaggccaatgccttctctgagactccacgtggaatcttccctggcctcttcctagatgttgccagtggctgtcaacccttggcattccttggtttgcagctgcatcactccagtctctgctcttgtcatcacgtggcagtctcttcctgtgtctttacattgtcttctaataacaccagtcatattggattaaaagcctaccccaccccagtatggcctcctcctaactcagttactgttgcaatgaccctatattcaaataagatcacattctgaggcactagggttaggatttcaacacatctttttggaggacacaatttgtgtttccctgtttttgcattgctgtaaaggaagaacaggctggataatttatttttaaaaagaggtttaattagctcacagttctgcaagctgtacaggaagcaaggcaccagtatatattcctgtgagggcctcagaaagcttacaatcatggtagaaagcaaacgaggagcaggtgcatcacatggtcagagcgggaggagcggggggtgccacatacctttaaacgaccagatcttgcatgatctaatagagtgagaactcactcattatcaagaggacagcaccaagtcattcatgaggtatctgcccccatgtcccacacacctctcactaagccccacctccaacattggaggtcacatttcaacatgagatttggaggggacaaacatccaaaccatatcattcggcccatggtccccctaatctcatgtccttctcacattgcaaaatataataatctcttcccaacatcccccagagtcttaactctctccagcaccaactaaaccaaaagtccaaagtccaaagtctcattaagacatgaggcatgttccttccacctatgagcctgtaaaatccaaaacaagttatttatttctaagataaattgatggtacaggtattgggtcaacattcccattccaaaagggagaaattggccaaaaaaaaaaaggaggcaacaggcccccaacaattctgaaacccagcagggcaggcattaaaccttaaggctccaaaataatctcctttgactctgtgtcttgcctgcaggacacactgagcaaggggtgggcttccgaggccttgagcagctctgaccctgtggtcttccagagcaccacccctgtggctgctcttatgggtttgagttgattgcctgtagcttttccacactcagactctcacggttttgagttgagtgcctgtaccttttatcatcagcaacttccaatggctctaccattctcaggtctggaaggcagtgttcccattcccacagctccactcactaggcagtgccacagtaaggactctgtgggggccacaacctcacattaccccttggcactgccctagtagagtctcttggtgggagttctgcccctgcagcaggcttcttcctgggcacccagactttcacatacattttctgaaatctagggagaagcttccaagcctcatttactcttgcattctgaggacctgcaggtttaacaccatgtggtagcctccaaggcatatggcttgcaccctctggagcagtagactgagctgtacctgaggacctttgagctgtagctggcactagagcagccaggatgcaggaagcagtgtctcaaggcttcacagggcagcagggccctgggcctggcctccgaaaccattcttttctcctaagcctctggggcctaggatggaaggggctgcttcaaagatttctgaaatgccttaaagatctatttcccattgttttggatcttagcgcttggcttccttttagtcattctaatctctctagcaagtgattgctccacagcctgcttgtattcctctccagaaaatgctttttctttctttgtcacatggccaggctgcaaattttccaaactttaatgctctgcttcctttttcaacataagttccaatttcaggtcatttctttgcccccacatttgattgtaggttgtttgaagcaaccaagtcatatcttgaatgctttgttgcttagaaatttcttcttccagttaccctaagatatcattcttaatttcttttttttttttttctttttcagagacagaatcttgctctgtcacccaggctgcagtgcagtggagtgatcttggctcactgcaagctccgtctcctgggttcacaccattctcctgcctcagcctccacagcagctgggactacaggtgcacgctgccacacctggctaattttttgtatttttagtagagatggggtttcaccttgttagccaggatggtctcaatctcctgaccttatgatctgcccgccctggcctcccaaagtgctgggattacaggagtgagccaccgcacctggctactcttaatttcaaccttctacagatgctaaggacatggacaatgcagccaagctctttgctagggcataacacaggtgaggtgacctttactccagttcccaataacttcctcattttcatttcagacctcatcagcctggacttcattgttcatatttctatcaacattttggtcacaacaatttaacaagtgtgtaataagttccaaagtttccctcatcttcctattttcttctgagcccttgaaacccttcccacatctccccattacccagttccaaagcttcttccacatcttcaggtatctttacagcaacaccccacccctcagtactaactttctgtattagtctgattgtgcattgctataaaggaatacctgaggctagataatttataaataaaagagccaataaaaattggctcacagttctacagagtgtacagaaagcctggtgccagcatctgttcctggtgagggcctcaggaaacctacaatcatggcagaaggcaaagggggagcaagtgtgtcacatggtgagagtaggagtgaggatggtggtgtgccacactcttttaaacaaccagatctcacatgaattaatagagtgagagtgagaacttactcattattgaaagtacaacaccaagccattcaagagggatccaccgctatggcctaaaaagtccccactaagcccatctccaacatcagaggtcacatttcaacatgagatttagaagggacgaacatcgaaatcatatcacaattcaacttataacaccaaataaaatgaaagatagaaggaagaataaatccaacagaaaaaggaataagaacaacacgtacttcttccatgcatttcttggtgcatggatgttttcaactctgtacagggttaaggcaaaatgtagaaagaaaagaaaatgctatggtggaaaataaaaggatcatttaattttatacagcaccttttctctagggttttttaagtatacagtcattgttataaatgttgtatgtatacttgtgggtttgtctataagacacatagaaaattgctttaactacttgtcgagggaggaaaagaaaataaatcttttgaactgatttccaagataggatattcaggtgattaggattctttacataatccaagatcaaacaggctcttattagaggctggttgagaggcaggacactgaactttgaattgaagttaaaatgtaaaacatttcatggtgaaggagaggaacagagtggatagcattatggccccaattttttgctactcctgctttgcacatgttttgccctgtggctttgcagttgccacgacactagaaaatgtgacttgatttggccaaaagaaggacccatacccatactgtgccacttctgagtgtatgcatcaagagactccacatacgttttgttcaatatttgtgtttatgtcattaacataagaatatgcttgggctgaatggtccaaggaaaatgtttagagttacgtgaaaccgtgttaagacccactgaattcagctgatccccaccaactcacagatctttgagaataaattattgttgcttcaagtcactgaattctggggtaatttgttatatagcattactttggccatagtaatgatataggataaaaggaatatgattcagagggttaggagaaaaaaaatgcagttacttttgatttacctgtggctgctattccagggtgctcttttgaggcatgattactttacgcaccttttactttgttagttaccttactttttaaaattcaacgtcccctgggaatttgttggaaatgtaaattctaagacttactcccagatttactgaatcagacactctgggatcggggacccagcgtccatattttaactagccttccaggtgattttaacacccagtaaagtttgagatctagtgctctccatgcaatagaatcatctagtgggcattcacaagacatagaagaagcctaagttccacacctcccttcccccagatcctatttaagtgcttcaaaacctctccaggtgattctaatatgcagccaaatttgaagaccccttttctagagggacttaatctagaaagtaatttgcttcaatttgacactgtgtgtgagaacagcacttggaaataataaaaattgacacaaccattgaggtcaaccaaatcaatatgaaattttgttcacccgatcgaatacttttatcttcgtacccatccatcaagaccttgttcgtgcctttgacacaggagatttgccttctcatgtgctgttcctgtggtctagaataatttcccctcttcggccaggcgcggtggctcaggcctgtaatcccagcactttaggaggctcaggcgggtggatcacgaggttaggagatggagcccttcctggctaatacggtgaaaccccgtctctactaaaaaagatacaaaaaattagccggggtggtggcgggcacctgtagtcccagttactcgggaggctgaggcaggagaatggcgtgaacctgggaggcagagcttgcagtgagccaagattgcgccactgcactccagcctgggcgacagagcgagactctgtctcaaaaaaataataatgataataataatttcccctcttcatttacctggttaacacttatttatccttcaaaatccctttctgcccctcccaagttgaattatcactgccccctttgttctaagaaattcttacctctcttagcacttcttatgtttataattgcgattattttctcttttactagaccatgagcatcttgatgtcagtacccatttattattcttttttttttaaatctccagaaacacagagaaagctctttgtgtgcatattgaatgaaatgagttcattctatggctattctttgtaggccacctcttcagcacttctgggattttttattgtcagttcttcctctgaatacactacatatgccaaatataatccattaaaactagattctcttctaggttttcttctcagtactaccccctgtttttttttttttgtttttttttttgtttttttttttttttggtagagattaggtctcaccatgttacccaggctggtcttgaactcccgggctcaagcaatcctcccagcttagcctcccaaagtgctgggttaccatcatgagccactgtgcccagccagcactcctttattcccaatatattatctccctgaatgatttcattaatttgcactggtgtgtggattgactcataaatccacatttcttgacccaacccttcccttgagctccagaactacatttctaatggcctccaagagtaaatggatggtttgctcagactctaaaaccaacatatatgaaataaaactttcaccttccctgaagccctagcttttcctttctgacttcccaggcgctaattagaaccactactaatcagtcagtaattctagacagctaggcacagcagcgaggccatcgccaactttctggggtccatgctagagtggcatttcacccattgatttccccaaattcattgccactgctttattcacattgtcactgtcttcacccacccttgtaataggataccgatagatgtcccttgattcctgtctcttacctttgcattcaagctccatattaccagaattatcttcttgagagaagaatcagataagaaaattaccttccttataacctcccaaacttgcatttagcttctcctcctttggcgatagtaacggatatttgctgcaagcttggaaaatgaagcgacgtttcaacttggtcatgccgacttgctttgtttcatgggcccccctcgtcttccctggggctgccctgtttcttcatactcctcagactctgggcccctgagtttttcaggaggtgccagagcatcgccggcaacacctaagaaaggtcatctttttgacctcatcattattgcgtactctcattaagggcaaagatcaaatcttttgcttagccacacttgtcagctaaagttagcacaaaaccgggcaacagaagcctctgaggaaatccttctgaatgagtaggtgtgagaaagataaataaataacagaggtcccttggtcaaagcagcagagctaggcagctctctgaagctgcgaaagaccctgggagctttgctgcagcgaagtgcctagtctggaattgatggatgcattttgcatctgggcttctaaccagaagagcctctcctcactttaaggaatgtgaaattgaaggctcacattgctatgtgaagccagagggcttttcagtacaatgcaacatcatgttctacttaccgaatggtggggctttcccttcacatggggattggctctgaacctgaacgggctgtgccaacgggagattccttgatgttccttgctgttcatgctccatgtttctgttcagtggagcatccgattaccgatgtggaccaggctctgttcggctccctcctcacactttattgctcatgattttcatatgttttgggtccattttcaagtctccctccaccccctagtctctgctcagcagggctataaaaatggatcctttcatctcttcgccagcaacaatcctccccgctcccttgatcatttggctaactcatctctgaacttcgtccaagctgtctgtctactcaggattccttgtctccccaaccaagatcagtctcccaggtgtggtggatgattagtacagaggaaggagttatgtacactgtgattagcacagtaataaccgtgatgttaataataataagaactcagtgctgacaatgcacctggactatagcaaacaagaggaagacgttgttttagcccagggagatgatctttcattctttttattgtaacatttataattctttttctcattatgccagtaacattcattctttgtgaacatttgaaaaattcaggaaaacataaatatatcaatatcaattacctataatcctgccatgcagagataaccactgttctgtaactactttggtgttttgtgtttagatatgtttgctacacacacttgcagactcacgcagaaaaatacaatggttgcagatggatttcaagctgtatatttaattttgtatcctctttccctaataccatatcaaaaagatttttctttatcattagatattcttctatagcatattttaaatggttatatagaaatgtatactgagtgatgtgtttggccatttctttatgggtggacttgtggactctgtcattatgaaaatactgtggggaagaagcatgggacagagcaagtgaaagtgacccacagaaatagcctgtcatcgggacaagagctggcagcaagctcaattcccacacactcagttctcacttgccaggaaaatggggaatgtataagcactgagccagtcaggtgggaaggaaacaccattttattttttttttttttttttttgaggcagagtctcgctctgttgcccaggctggagtgcagtggcacaatctcggctcactgcaagctccgcctcccaggttcacaccattttcctgcctcagcctccctggtagctgggactacaggcacccgccaccacacccgctagttttttgtatttttagtagagatggggtttcactgtgttagccaggatggtctcgatctcctgacctcgtgatccgcctacctcagcctcctaaagtgctgggattacaggcgtgagccaccgaacccagccagaaacagctttttaagtgagctgagaaaggggtatggagcaatcttccttgtgtctagaccttaaccctttagccgaataaacagagatgacctagagggggtgagggaagggcaacagcctgaagaattagcagtcttgcccacccagcctcatggggcagtggagggtctcacccacatctcagagcttaagtgggagttattgtcccagcacagacaatcatgacctaccctaagagataaaccaatatggtgataaaattgccttcgcggatgtaagatattctctggagggagagactatagcaggtcaaatctacttcaatgtaaaacatcgactgcttctgttttactttcttttcatagctgtattagaaagatccaatccttcctggggggttggaatggggattacatgtaaaggggcctgggggagtttgttgggggaaatgcaaatgttctaaatctgatttgtggtcatgatgtacttcttaataaggttaccaaaaattattgaattaaacattatcatatgtaaaatatacttccaataaagctattaaaaatagagctaaaaacatctagcttaaaaaaaaaatctagtgtgaaacaaagaaaatagacccttttttgagcattgaatagatgcaagttgagaaacccggaaagacttgtgaaaagcaagatggcggcctgcacagtagatcccatccatgtggtgtcaggcatagaaagctgtaccccagccaactgaatatagctggaattgccctaagacaaacttttgtcctagctttttttttcctcgcaaatggcttgtcattttccatctttgtccagcagtaattttatctttagggacaaagattggccatctaaaattagattaggctttgatttttgctggctatgtgagtttgggtgagtcgcttaaccttcccgggacttggataccatgtctgagagtgagagatgatgactggctctcaaaggcctgttgagttttaatattcctctaacttcatgattcctgctttgtaaacgattattaacacatttttatagccaattttctagtctctattgtgctcaagaacaactgtaagtcatgagtatattgtaagattaaatggaataatagacctgaaagagatttgctgacaaaaaacaacacctatatctctggggatgtaaaatggttagcacaaggcattatcctgacttcctcccaagtcaacctttaatattcttccaaaaacgtacctcctaatgttggagaaatggttgtcatcggctggacttggttgggctgagttttgctgattttttttttttttttttttttgagacgaagttttgctcttgttgcccaggctggagtgcaatggcacaatctcggctcactgcaacctccagctcccaggttcaagggattctcctgcctcagcctcccgagtagctgggataacaggcatgtgccaccatgcccggctaattttgtatttttagtagagatggtgtttctccatgttgattaggctggtctcgaactcctgatgtcaggtgatctgcctacctcagcctcccaaagtgctgggattacaggcactggccgcacccagccaagttttgctaattttttgacctgatctttaaaacaaaagttctctccacatacatgaacattaataatatcctcattgcaaagtagaagaaaacaacaacaagaagagcaagttgaaggatcttaactgagtacctaaaaggggtaaagaattccagaaagcaaatggttggtacaaacaagtgctccacaatgctcaggttttgcttctctgtgagcctgcagaacaagtctgttctcttgccataccccacaggtttcatatgtcattcttcacaaggcccttccagaatggacaccgccaagcaggtatatggttcttggagttggtgcttcatgttgacagtgcagccatttcatcatctgtgaaaatgtggcgggggggcgggtgtggtggctcacacctgtaatcccaacactttcggagaccgaggtgggcagatcacttgaggtcaggagttcgagaccagcctggccaacatggcgaaactctgtctctactaaaaaaaatacaaaaattagccaggcctggtgattagccacatgcctataatctggctactggggaggctgaggcaggagaatctcttaaactcaggaggcagaggttgcagtgagccaagatggtgccactgcactccaacctgggcaacagagcaagactccatctcaaaaaaataaaacataaaacaaaaaaaaaaatgtggcagggagcactggtgggctttggtaaaggctgaacctgggactcacagttcaaaatgaaatgcaatggggcatcaatcagagatatgtagatatatgtaaatatattagatttttaatgctactctgaaatgccagtttggccctcaaacttatgctctcatcaagtggccagctgccaaattgatactttgttttttgctgcccagacagagcctaagaactaaaaaatccttttttttaacttcttgagtgctggcttgtatttgcacaataaagctcaacatcttgctgtaacagccttgctggctgcattcgtatagcccttccttggtagagagtgattgtggctagaagccctgagaacagaagtgaaaggttaagctcacaatataggctttcgttccagatggggtgggttactttgcaggacagttgagtctgaaaggtgaaaatgaaataaatacatcttctctctcaacgcctttcccattctccctgggggtttgaatgaagaggatgttttccagattgaaaaggatcacctgccaaagttagctgcttcaacaggttggttcattccgttgctcattccttcgttcacactctcttctaaatactcattcattcattttcctccatgttttccctcatttttcttccatgttttctggcactcagctttataaacacttgctgacccgcctgtacgtgtccagagctctagctggctctggtgacacaaagatgaataagacatggtattttcttccaaaacactcactaaggaaagacaaataaaaacacataattgcaatcttgtgggatgaggaataccacagaggcttgtaatgagtacaagcatggaataattaatcctacaggtgtcactatccggcaaaaaagttcttttgaccatcacataaagtgattattgtggtatggtcacatagacagcttatctttctcatggatacaagcatttgacgatagaaggaaaatgcacttctgaaaagttataataacacacacacacacacacacacacacagtttattaaggcagtcgatcttccaggatttctcccaagctgttctccctctcttactcacaagtgtggaagtttgcccagatgacttggttccctggtgtggaaggctgagtgccaatagactcggtgtgtcgtatctgtgttcttaagagattgggaccaagaggggatcctgcaagcagcatcaggatttccttccatactcaaggaagggtatggcttactcctcactggcttgccgctctgaaggcaaggatctcacaatcctggtagaaaacaaaagatacaggttatatttctttgtgacttacatgtttgtcaattatttaggaggaatcctccaaaaatctcagcaaaaagatccagatatgaaattttttcttttcttcaacagaccattggtgtttttaaaacaaataacaatgggtttatctcttggtttaattccgtttgtcctgttcattcaattaataaacatttattgagtacctgatgtgtgctagtactgtcctaagcccctgaaggacacacaaccccatctgagatgttgcagaaagaggaatggctctcctatgccttaatctaggattttgttttctcttttccatcccctcgaccccctacgcttttctactcacatcattatcaccagcactctgcatacttggggcccaccaagcacttcttcattgattatgtgtatgctctaattggatcaatcactaatagctctgccttcagtaggttccctgcagagcctgtaaataatgcaggcacttaggttgctctaaaagcagcttagaaaactgaaatcaggcacccaactgagtagctgcagcaggtcctaaaaaattacagagtatttatacagtcatgtgccccataacgacgtttcagtcactgacagactgcatgtacaacggtagacctctaagattataacggagctggaaaatttcctattgcccaaagatttcagagcacaatgcattactcatgtctttgtggtgatgctggtatcaacaaacctactgtgctgccagtcatatataaaagtatagtacatgctgccgggtgtggtggctcatgcctgtaatcccagcactttgggagtctgaggcaggcggatcacctgaggtcaggagtttgagaccagcctgactaacacagtgaaactccatcagcgaaactccgtctctactaaaaatacaaagttagctggaagtggtggcgtgcgcctgtaatcccagctacttgggatgctgaagcaggagaatcgcttgaatccaggaggcagaggttacggtgagccgagatcgtgccattgcactccagcctgagcaacaacagcgaaactctgtctcaaaaaacaaaaagtatagaacatgcaaaaagtcaactgtaacacacacacacacacacacacacacacacagtttattaaggtagttgatcttccagggtctctctcaaggcattctccctctcttacttggaagtttggaaggacctcaggcaggcccttcagtaggtgtccagaagaagacatttttatcataggagataacagctccatgcacattactgcccctgaagaccttccagtgggacaagacgcaaaggtggaaaacagtgataacgatgattccgatcccgtgtaggtctgggctaatgtatgtgtttgcgttttatcttttaaaaagtttgaaaagtaaaaaaataaaataatagaaggaagcttctagaataaggatgtaaagaaagaaaatatttttgcacacccatacaatgtgtttgtattttaaggtaaagtacaaaagagtcaaaatggcattaacattaaaaagttacagtaagctaaagttaatttactattaaagaaagaaaaaattttaaataaatctagcgtagtataagtgtatagtgcttataaagtctgtagtcagcccggcgcggtggctcatgcctgtaatcctgcactttaggaggccgaggcaggtggatcacgaggtcaacagatcgagaccatcctggccaacatggcgaaaccccatctctactctaaaaatacaaaaattagttgggcgtggtggcacgcagctatagtcccagctacttgagaggctgaggcagaagaatcacttgaacctgggaggcaggtcgcagcgagccgagatcgtgccattgcactctagcctggcgacagagcgagactccgtctcaaaattaaaaaaaaaaaaaaagagtctgcagtgcagtcatgtacagtaatgtcctaggccttcacattctctcaccactcactcactaactcacccagaactatgtccagtcctgcaagctccattcatggcaaggatcctatacaagtataccattttttatcctttatatcctatttttgctgtatcttttctatgtttagatacacgaatgcctatcactgtgttatactgcctacagtattcagtacagtaactgaattagttactgtaggctattacagtaggtttgtagcctaggagtaacaggctagaccacatagcccaggctgtaccatctgggtttgtgtaagcatttttctgaacaaattcctgttgttaagtgatgcataactgtactttcaaccctgagttttttctgtccccaagcaaagtggaatgtagtctagggctagagaggagtggagaaaaagtagatttttccttcttttctgacacttacatataagcttgagagtacccttggagagcgtaatatttaattcatttccttcttattctcctgaatcactgaatgctagacctggttgctaccttaggattcttctaagagcagtcctctgttgagtgcgggtaagaggggagatgaaagagattccaggaggatgtcagatgtagggtgtgaaggattcccgaccttcctcaatagattcccgttccagctctctgaggatacgtagattggagtcactgtcctcccctgtcccagaaaggctgctgagctcactgagggtcacaagaaaatattttcctggggctgaattaggatctttagtgtgtctaagccctaaaattatgaagaagccattcctcctctactcttccacaccctcacccattcaaaattcaaaccgctgtaaactgtaaaataattggaagaaattccaacagtgttatgattttttccatattttgagcatattttgaaatactaaattacttcaattggcatgtgtgcgtgcacgtgtgtgttccctttctctttgccgtgctctaagcacatgcttgggctgcttaatggattttctggaactgagttgttggccctgccccagagaggccaagctatccctaaactcagtaaccaaggcccaggatcctgtactccactccaagggccaaaagctggctccttatgggtggaaaagttgtgatacctttcctcacccatcataagggtcaaggccaacactcctgtaacaaaagaggtgaacaggagaaatgcataacaaatttatttaatcaaagttttatgtgacatgggagcctttggaaatgaagacccagggaaaacctttttttttttttttgagatggagtctcgctctttggcccaggctggagtgcaatggctcaatctcggctcactgcaacttccgcctctcagattcaagtgattcttctgcctcagcctcctgagtagctgggattacaggcgtgcaccaccatgcttagctaatttttgtatttttagtagagatggggtttcaccatattggccaggctggtctcgaactcctgaccttgtgatcctcctgcctcggcctcccaaagtgcttggattacaggcgtgagccaccgcacccagccaactgtctatttttatgcttagacttgatgcagaatagacagccttgtggaaatgcaattggacaaaggttgtgatctaatggtaatagactaagcaggagcccagcatggtctgtctgctcagattcttcctggcctccctgtgtagtgttccttcctcctgggtatgggacaggaccctttagaaagagggtcttcaagggggaaggaagaagcgagagaaggtggcgtttatagggtttatggcttacttttggagagaagagttctagtttccataacctgccttgaggaagaattctggtttctgtgactcacttcggggaagaaaggagtgggaggcaggaaggcagaagaaggtcagagagggagtttatatacgaggccgcttctgagactttccaatccctcttagttcaaagtactcagtgtactcagcatgcccaagcaccatactttggggtgtagttttttgagccccagtactcctctcactgatcagaggtaacaggggattgaggagctgactcactggaacttaaaagcacacaagaccaagaaaaacaccagaatgcaaatctaggaatttacaatgacaaacgattgtcacaacgactggaaaacgcagagtatgtgtgatcggcacattctctcccaataggcaaaaccaaatacaattagatcaagttataatcagaaggctccaaagtggacccaaaactgggaagtcgatgaatcagttggttccaggcatcaatctgatttctgtgtgctggcatgggaaatgccaacatatgtctccagctccctccttttgctatgttttcaaaaccaaccaaccctactgctgattggaacttgtttagatatgtaaatatattcaaataaattataaatagctggaagctatttttttctgccccagtagattttatatttgtgattcaatctatcatgcagtactcttaaaatgttattctcacaagcaacttctcctcatttcctgattcattttttctgtaggaggtgggaggtgataaagaagagggaatgataagttattacagttccagaaaaggttatatttcccctcatttccaggtaagaaaacagacatgattatagtcgtatggtttgtgacaaaggctgggaatagaataaaaatattttattcattccatgaacatgtgttaattgagcacctactgtgtgatagatattgtgctaggtttggggaacaggacggcaagtttcctgccttcatggggcttgcattctagtttgggagacagataatatagaaataaaataacaaataaattataatgtcagatagagatggaattaaattaaaatgatgtgatggtagcagaatgtcaaggtgtgttaaagactttctctttgagaaggtgacaattgagttgagacttgagtgataagatggaactagttattcaaatagccagcccaagaaagacattccagggaaagtggaaccagctgctgcaaagactgcatgttcaaataacagaaagaaatcaggaggaagagtttagattttaagagcaaagggaaatcccttgaggggtctaagcagatgggtgatatcctctggtttgtattttaaagcaaacatcctcactgctacgtggagaatggattgcagggaattaaaagtggaacttgcttccaatcttgatttccaactttgtgcccttttctcaatataatccgccttcttcaggctgttcaacagatcaattcagttaaaaagaaaaacagagtcttaagttgttatttgctggagttatagcatctaaaccccttgttgattgactaaatgtattcttttttggtgggctattgtaatactgtaaatagagccttagactggcatgcattagagcttgctctaaattgcttatatttattggaaaaagtggactgagttaagatggcttagctaaacctgtttgagactgagttttcaattttgggagtcaaggaccactggactcccattcaacccctaataaatatatatgttatatataatacatatataatataatagtagtacgtatataaaatatataaagttactactatattttatatattatatatatgtgtgtgtgtgtatatatatatagagagagagagagacagagagagaaaacttttctcttatttcaggttgatttgttttaaaaaattatgacaagtaatgttcttctcctatatccaccttaggagttctgggccaaaatattttggacgaaatttgagatagatttggtgtcctgggcagccaccaaccaagagatttctgactgttttaggaagcatcagaataagaaatcaaagactgcacttgattgtctcactagaattccacaggagtccacagaccttagatggagactgtgaatattcattgacatcaactagtactgctcagaagagtctgtttcttcatacccttctaatataacctgaaacctgtatgtagaatgtttatgatttattctccctttaaaaaaatatcagagactcagagtcattttcaataatattttatttcctacaagctttatttctaacgattttggcagttcaattttccatccagttgagccaagattgatcactaagttctcctaggtttagacattgaagtttgttcactgtaacggtcttgtttactaagtatgtctcaccactttttctggtaggtccctggaagaccaatttcttgtacaaagtaaaacgacatttgaactcggtcatagctcgtgggaacaccatttgaacacactcttttgagggtttgcaggaagatctgggggatgagagctacaataatctaatctggccactggggaagagtaaattactgctctctgtagtgtacatgaccttcaccccagttatatttttgaaataattacatgagagtctgtcagtggtgtctatgggagagttaaacagaatttacaattgagtggtctgttcacccttggatgtagctcaatgtcttgagataaatttgcaattcaaatgataaaaagtctgaaattccttcaaagcagccatttcattcagaatggtagtcaagtgatgtctaaaattggatagaataaccatatagttggcttgctgacaatttttatacaatggctaaatattttgatttgatacatctaacctgagttgaatacttgtttaattttagtgatatgtaattttagtcaaacagtgggtcctatagatctcatatcaatccatgctagacatagacatgtgtaattgattattctttggatcaaatacagcctcagtatattacctcgctgtgctaatgaagtttgctggcagcacttgattgagaggtactaatgtaggaaaagaaggccaatattctttgttggctttttgcagttaaaatttatccttgtcaatgttcttagggcctgtgagataaagttccctcaaaaatacatagcaacagacccaattataactttttaagagagactcaccttaaatataaaccatgcaaccatcaatcatgggaaagcatgagtgactatgttagtatacttaaaaaatagacttaaggaatattatcagagataacttcaaaataataaaaacaaaatctgacagaattaaaatgagaaatagacaaatggacaattacatttcaatattttaacaattctctttaaaaaattgctagaacaagcagatgatacatgataagaaagaacatagaaaatgttaacaatattataattaaaattaaccttattgtcatttatagaactatacccaaccataatagaatacacattcttttctggtgaatatgaaacattcagcaagatagaccatatactgggccataaagcaagtcttaaaatataaatagtaattaaatcaaataaacaaatagtattggattatacatagtatcttcttttactacaatggaatgaaattagaaatcaaaaacaaaacaatagctgaaaaatcctcagatattttgcagtgagctgagattgcaccagtgcactctagtctgggtgacagagtgagatccgtctcaaaaataaaaaaaaaaaatgaattataccatacataaatttgggatttgcttttttttttttcattcagcgttacacttctaatatacatctatgtttttgctgtagttttgttcattcattttctctctgtgttatattctattgtgggaatgtattacaacttatccaccatcatctagatgtttaatctggtctgttttttgtttttgttgttctaatctcatcagttttggaaacaaaatatattgtgtaaacttacaatttaaacaatatttaaaaacagagaattacataaaagtatcaacattaaaccttcaaatactttatgactttctatttgacagcatccctctggcctcaggggttgtataatcgaaatgagcgtgttttattctcccccaaacttcatgccattccagatggtttctgctactaatttgtatgtcaggcttcaactctgtgtcattggtccttacactttggggttttgatgtggctgtccaggtgacctagagggaacagaaatatttctataaccttcaagtcccttataggaaggaggtaccagaaatgacctattctactcacagtggagatcagaatggtccaatttgtgaatggaatcttctgcataatgtggttttaacaaatgaagaaactgagtcctggagagagaaaataataaggttatgaaggttattagaggcatgtcaaatcccccagtgtctttgggaatgagtgattgtctctagataaccaattagtatgcaaataaattacattagaaagaaaatgcatgaacttgccaggatcattaatgcattaacagaattatctttattagattggcttgctgttacctagcagagaccaggcctgagggaaaggttcaccaggagggtcagttttgactatttcgttagcatgtcctattgtctgggaatgccggtcccagagaagagaatcaggagagtgccttagggctgagccccaaggacacaaacaaaagcattgggttctttagaggttggggttggagtggaagcctagggcagggatcagcatccaaagaggagaggtgaggatgtttaccagtgtgataaatttgtgcatatacttggtttttgcatgaacatttctgtgttcagggagagaaataggtctttcctacttttgtttaggacagtctgtgatcatcataaagccagatacctgaatacatctttgggttctctgttttcttcatttcttatcttccctcttcattgtcatttgttctcccacctgctcttccttcattcctcatgactccatctttttcaaagtcttcaccatgtctacactgcattttgacaattttcttagctagtttacttgcctggtccctcttctccatttgtagaacctgcccattgcagcaaattcatcatgctacctcctgtccaaaatcttacaatggcttcgcatcagtacagaacaaatccaaatacttgtgtttcgtggcaaagtagataacaaaatagtattcgtaacagcagacatctcacctactcatggctttactgttttttaaagtgagctcccatcggactccctctaacctgtgagctctcttctcctaatcacttaaaactattgatatgggctgggcgctgtggctcacgcctgtaatcccagcactttgtgaagccgaggcgggaggatcatcggaggtcaggagttcgagaccagcctgtccaacataatgaaaccccatctctactaaaaaatttaaaactagcagggcgtggtagcacattcctgtaatcccagctacttaggaggccgaggcaggagaaccacttgaaactgggaggcggaggttgcagtgagccgagattgcgcctttgcactccagcctgggcagaaagagttaaattccatctcaaaaaaagaaaaaaaaaaaaaacagaactgttgttgtggccagatactctcatggcagactcatctcctaatctcctaacccggtcctgcccctatacccacatcacatctctgagtctctatgcaaatagtgtttccagcacagcagtgagcaatgcatgccctcccttggctgcccaactcaaaccctgttttgcttaccagttctgtgttgacctttccaatgtattttcagttctgtctttttaaaagccaataaataacaaactaaataaaataataatcactactatgtgttgaatgctgtggaatgcagacactattctaaatgccttccatgccttatctcatgtaatccccccggtaaaaacttatgactgaggtctcattatgattcccattttacagagaaataaactgtaaaagggagaggtggcctcagggccaatgtctagctccaaactcatccagcttctgtgaactgctacctcctctctctatgacctgtgttaatgacagcctacaccactcatttttgcacagatgtctagctgcctcagtgtgatctaaagcctcccttacagcagctgtatgtgtccctgcaggccagaaagtgcccagccagtgctactaatgccatttctctatgtctgtcctttgatgttcttcaattaaatagtgtttatcagagatgctgcctcaattctttctagaagtaagatgggatgtcaataagtagatacaactcattcacgctaaggaattagtactttaccctgtgggtcatagatgagtttaatagtgggataacaaggtccagttcatttctttttgttagagattcctctatggcagtgctgtagagggtagattggagtgggaaaggattatggctggaacagcagttattgcaaccctgtcatctctcaacaaattaatgaaatatatatatgcatatatgtatattttacacatatatttagattttaatctataaatatagttttccttacaaacatttctttgttccatgaagtaatttttgctatttatttttaatagctttatggtccacagtataagctggcactttaattagcaagagaaggtacagataatgccacagtaacacataaaccctgaaatcttgggggattcatagacaatggtttatttctaggccacacaaagtccagtgtgggtctgggagctcttaagaattcctgctacttccggccaggcacgttggctcacgcctgtaatcccagcactttgggaggccgaggcgggcagatcacaaggtcaggagatcgagaccatcctggctaacacggtgaaaccctgtctctactaaaaatacaaaaaattagccgggcgtggtggcgggcgcctgtagtcccagctactggggaggctgaggcaggagaatggcgtgaacccgggaggcagagcttggagtgagccgagatcgcgccactgcactccagcctgggcgacagagcgagactctgtctcaaaacaaacgaacaacaaacaaacaaacaagcaaaaaaagaattcctgctacttccagctgggaagtgttacactcactccacgtggtctccatggctaccaccaaaaagagtgtttggaggaagccctcccacattaaatgcctcaaatcagaaggtaaatatgtcacttgcgatcacacctcatcctctgaaatgtatgacagtctcccacctaactcccaggggtctgggaagcaaacctaggtaggaaatgaagatcaacgtggcgagcgcttggtctccacttcagctctccgtaaatatctggtaaatgaacaaaattttacaaagaggaaacgcaggaggctcttgctactcaaaaaggatttacactgaaattttgatattcacaaatatcactgaggaatattcctcagtgaagtcttcctaaaggcaacctacagcattcttcttttcattttcttcatattgatcaccagcagtagcagctgcatgtgatttccttgagattcaagttgccatctatggttcaaggagagataagatttttgtttgtttgtttgtttgtttttaatttctcaggagttacttagtggctgctgaccagcagaacccaacaatgacccaggagaggtaggtgctgggccctgggccaggctgcaccaagaccattcttccagcttgtccatcttcagcctgtgtgatccaaatttttggctgggaaagattacaaattgctatatggcatgcctcttcaaggttactctcaaataaccaaaaccacacatattaaatccctgagtgctctactatagagctctaattttggggaggctcttctttcagttatgtgtagtttttgagttccatataagaaatacagccttttggccaagtgtgaattatgtgaaagcaatgagaaaaggaaaaacgtataactaacttcatacttcagtggtttatgggctcccatattacccctgaaataaccaaagaattaatcaacaaaagatgctttgtgagagccagagatctgctatagtctcatcctgcacacttggtgagtgtttccagggctctatttgtagtgaaaaacctggttagtgggaataagtgggcagatctgtggccaaataacaaacagaatttctattactcaccccatatgcactggatcaatgagggaataagatgcatttgcctgtgctgaaggattaagtgcagggctgtattcttaaactaggaacttgaaaggtttggaaaataaggcacatcaaattagtaggatctaattcatgatatcttcatttccttccaaatttcccctcccaaagccattagaggcaacacttcacacttgattggctctaaaaaacacacaaaacaaagctatagtgttggtttttttttttctgctgctgttcattgtgacactttatttggatcagaaaacaccttcaacaaaaacaacagcagaaggcttagacgtcgattatgacactccatggaaaacgttcaaagtgagcctgtttagggcaatttagaaacggagaaaggtatgagataagcagaaataatttgttccctgttgcagaggtcttttgcatgaaaactactttactaattggtttaacttggcacatctaatatacacattgtgtcttgtcttcatcttcaaagtgttccatgaacaatggggctgattattccaggatgttctctcttcaaatgtcttgagctgagagtagcaaagtcctgaggctgcgttcccctgcatggggcgtggtgtgtatgccatgggggtgctgtgcagacagcccagccctctgatcttgacctaccacctgggaggaggagcccagggctccggaggaggtggtcctcacccaaggctcttccctggggagcaaggtcatccagggaggtacagtccccttagaagaacaaaaaatctgaagaaccctgaacgtgaggaagaacaatggagattccaaaagccgagactggaacagcattccagggtgaggttaaagattggaaacggggttggcctggaagctgcttcaagctcttagagaatcccaaacatgtttctcaggcaggatatgttcctgcccctgagtttctcctccatgatacctgaaattcttcgagtgcagtgagtcagggttctgttttaaaattcagataaaagaatgctcttaaagtatgcatacaatgacgtattattcagcctttgatacgaacaggagatatggatagaagagggcagttccctgagaaaggccctaccctcaagcctggagacccaccaccctaaactgggacaggcattcctgttttcacgcccaaaaagttggctttgggcccaccacatccccccatcctttacccatataaatctcgagccccagtctccagaagcagatgagcagatgagatgaggagacgagcaggcagatgggagaatgatgtggcagagaaagagagaaaaggagtaactctgggaacgtctgaacactgagaggagttcagctggtggcacttggagaggagttcggccgctggactgccagcctccagagaaagatcacctttctacttcatctcctcttctggctccccatccatcccactgagagccatctctaccactcaataaaactcccgcattcatgctttgagtccgtatgtgactcagttcttccaggatgcaggacaagagctcaggatacagaaagctgtcatactggccctctgcccttgcagaaaggcagaggatccactgagctggttaacactcaagctgtctgtggacggcaaggctaaaagggcacgctgtatcccatgcccacttgcactcctgtacctgtctgtctgcatgcttcccctcccctcaggggtttgagcagcagtggcaacttgaacaggtgagtcacatccctgtcacatgtcctgtgagggagatcagaaaagtctctcatttcacctttaaaaagaaagaaattctgctaattatgacttctgctaggatgtacgctaagtgaaataagccaagcacagaatgacaaatgctgtatgatttcatttatatgatggacctaactgacatggtcaagttcatagagacagaaaatggaatggtggttgccaggactgggggaggaaggaatgtggagtttaatgggtacagagtttcagttttgcaagatgaaaagagctctgtagatggatggtggtgattcttgcacaaggtgaatgtacttaataccactaaactgcacactaaaaaatggttacaatggtaaattttgtgttatgtatattgtactacagttaaaaaaaaaaagacctatctctcagtgcctagctaagattgaaaagccgtgttcagaggaggaagaggaggagcaagaagtgcttgtagagggaacagggaagcaggaggtcctattgggcatcagaggacagtctgaggacactggatgagagttctcccatggagaaaaagccagtgagatatgagatatgctttgacattttacttaataaccatcttgctcctctcttcaatgctgggctctggctccttctagaaaagagagatttctttatcttctggagtttttgttttctgtttctcctaataaatgcatttagggataagtacttctctacaactttggccacacttggattttaacctggagcgttctcagtgttgccatttctaagtaaattcaggtttgttgtttaatttctgtgtttaaattccacatcaaacaccctgtgaaggcttatctatgatctgtgtggcatcagtgcctccagggactgcggagtaggggtgaagagagaggcctggagatggagtggggcatggcactcagtgatgggggacggggtcggggatgcgaaatagtggctgttgcaatagctcatggagttcccaatgcgggtcagtcttctggttatgggtcactcttgaccacccagggtgctacttgtgactgactccctaatgcataggagagaagccaccaaccagctggagacccctcacctcccaagggttatcgcaggtcctcttagggccacaacactcccacctttgtgctctgagcgactttgtcctcctttggtcctccatgtgcatgtttttgctcctgttttctctagtcgcctaactttttcctaggaatctccataattcctgacccatcaaccacatcactttttacttttcagtgccatggtgcgttcctgcctcctgcacatcttctctgtcattaggagtcaagctggtgggaggaggggaaaagaaacaaacaaaaagaagcagaaaagccacaagtctgcctttcttcgtggtccaaaacacataagctcttctgcgcccaaatatcaccagacacctgcaagttagctcactgcaaccttggcattatcagtactgcacaaagcccccctcagcatacagcataaactctgcactataaaatctctagtaagtctctgcttctttgcagtcagcttctctgctggtctgcccattgactcctcacaaaacattttcctactttctctaatgaatctgcttttctttgccgacaattatcttggtaaattcatttactcccataccaccagcccagatagtcatcactcattcaagtcaaggaggctctaggcttatcagtcgaccacactcatttgatcattgtgtagagctcaagtttattctaatctgggctcatgtgttgttgaaaaacttatttttttgttacaaagacaaaaccagttgtggagtaactattttaggagtctgggcaattcttcctggggaggatcctggcttcttctctggagagatagcagactcctctatggtggccgcacccttgcccacttcttatttgagattttccaagacttgccaccaaaccctctcctctcctggctccacactccctgccctctcctctcctggctccacactccctgctgtggtgaatatcagtgactggtgtctctcaaatttatgcaacaacagcttagacacctctctgagctcagtgctcacaatataccatgtaacagttaacttgctaactcctctcgacatgagtgtttctatttcagtgaaaagcaccaccttgtactctcaacagctgattagtctcccagtcctgaagattctacacatcacaccctgaatttaagtgacttttctcctttcagtcttttcccagtgttctttcccaaagtagttgaccccactgtcttctctggcctttgttgctgcaataactccttacctggttgacccactttcaatttatttgttcttcaaagtgatttttcaattaattctaacatagagttgtgcttttaaaatgattcctttataatattaaaataattaactttttttttttaatctggcaagacagctgaatagcagcagctccagtctgcagctcccagtgagaacaacacagaaggtggatgacttctgcttttccaaccaaggtacctggttcatctcactgggactggttagacagtggatgaccatggagggtgaccagaagtagagtggggcattgcctcacccaggaagtgcaaggggctacagacctacctctcctagccaagggatgctgtgagggactgtgctatccagcccagacactctgcttttcccatggtttttgcaatccacagaccaggagattccctcttgtgcctacatcaccagggccctgggtttcaagcacaaaactaggcggtcattcaggcagacactgagctagctgcagaagtgttttttcatacccgattgatgcctggaaccccagggagacagaaccttttgctcctctggaaagacggctgaagccagggagccaagtggtcttgttcagtaggtcccactcccagagcccagcaagctaagaaccagtggcttgaaattcttgcctgccagcacagcagtctgaagttgacctgggatgatcaagcttggtgaggggaggtgcatctgccattaccgaggcttgagtaggtggttttcccctcacagtattaaagaagctgccagaaagttcagactgggcggaacttaccacagcatggcaaagcagctgtggccagactgcctctctagattcttcctcactgggcagggcatctctgaaagaaaggcagcagccccagtcagaggcttatagataaaacccctatctccctgggacagagcacctgggggaaggggtggctgtgggagcagcttcaacagacttaaacattcctgcctgtcagctctgaagggagcagtggatctcccagcacagcacttgagctctgctaagggacagactgcctcctccctcaccccatgcctcctgactgggagacaacttccagcaggggttgacagacacctcatacaggagagctccagctggcatcaggtgggtgcccctctcggatgaagcttcttgaagaagaagcaggcagcaatctttgctgttctgcagcctccactggtgatatgcaggcaaacaggatctggactggacccccagcaaactccagcagacctgcagaagaggggcctgactgttagaaggaaaactaacaaacagaaagcaatgaccatcaacatcagcaaaaaggacacccacacaaaaaccccatccaaaggtcttcagcatcaaagatcaaaggtagataaatccacaaagatgaggaaaaactagctcaaaaagggtgaaaactccaaaaaccagaatgcttcttttcctccaaatgatcgcagctcctctccagcaaggacacaaaactggatggagaatgagtttgatgaattatcagaagtaggcttcagagattaggtaataacaaatttctctgagctaaaggagcctgttctaacccaatgcaaggaagttaagaaccttcataaaatgttacaggaactgctaactagaataagcagtttagagaagaacataaatgacctgatggagctgaaaaacagcacagcacgagaactttgtgaggcatacacaagtatgaataactgaattgatcaagcagaagaaaggatatcagagattgaagatcaacttaatgaaataaagtgtgaagacaagattagagaaaaaagaatgaaaaggaacaaacaaagcttccaagaaatatgggactatgtgaaatgaccaaacctatgcttgattggtgtacctgaaagtgatggggaggatggaaccaagttggaaaacacacttcagggtatttatccaggagactttccccaacctagaaagacaggccaacattcaaattcaggaaatacagagaacaccactaagatactcctcaagaagagcaaccccaagacacataatggtcagattctccaaggttgaaacgaaggaaaaatgttaagtgcagccagacagaaagctcatgttacccccaaagggaagcccatcagtctaacaatggatctctccccaaaaaccctacaagccagaagagagtggaggccaatattcaacattcttaaagaaaagaattttcaactcagaatttcatattcagccaaactaagcttcataagtgaaggagaaataaaatcctttgcagacaagcaaatgctgagggattttgtcaccaccaggcctgccttacaagagctcctgaaagaagcactaaatatggaaaggaaaaaccggtaccagccactgcaaaaacataccaaaatataaagaccaacaacactgtgaaaaaactgcatcaattaatgtgcaaaaataaccagctagcagcatgatgacaggattaaattcacatgtaacaatattaaccttaaatgtaaaagggctaaatgtcacaattaaaagacacagactggcaaattggataaagagtcaagactcatcagtgtgctgtattcaggagacccatctcacgtgcaaagacacacatgggctcaaaataaaaggatggaggaatacttaccaagcaaatggaaagaaaaaaaaaaaaaaaacaggggttgcaatcttagtctctgataaaacagactttgaaccaagaaagatcaaaaaagacaaagaagggcattacataatggtaaagggatcaatgcaacaagaagagctaactatcctaaatatatatgcatccaacacaggagcacccagattcataaagcaagttcctagagacctacaaagagacttagacttgcacacaataatagttggagacttttaacaccccactgtcaatattagacagatcaacaagacagaaaattaacaagaatattcaggacttgaactcagctctggaccaagcagaactaacagacacctacagaactctccaccccaaatcaatagaatatacattcttctcagcaccacatagcacttattctaaaattgaccacataattggaagtaaaactctcctcagtaaatgcaaaagaacagaaatcataacaaacagtctctcagaccacagtgcaaccaaactagaactcagaattaaggaattcactcaaaaccgcacaactgcatggaaactggacaaactgttcctgaatgactactgagtaagtaatgaaattaagggagaaataaataagttttttgaaaccagtgagaacaaagagacaatataccagaatctctgggacacaggtaaagcagtgtttacagggaaatttatagcactaaatgcccacaggagaaagcaggaaagatctaaaattgacaccccaacatcacaaaagaactagagaagcaagagcaaaccagttcaaaagctagcagaagacaaaaaataactaagatcagagcagaactgaaggagatagagacacaaaaaaacccttcaaaaaatcaatgaatccaggagctggttttttgaaaagattaacaaaatagatagactgctagccagactaataaagaagaaaagaaagaagaatcaaatagacacaataaaaaatgataaaggagatatcaccactgatcccacagaagtacaaattaccatcagagaatactataaacacctctatgcaaacaaactagaaaatctagaagaataaaatctagaagaatggataaattcctggacacacaccctctcaagactaaactaggaagaagtcaaaccctgaatagatcaataataagttctgaaattgaggcagtaattaatagcctaccaaccaaaaaagtccaggaccacagggactcagccaaattctaccagaggtagaaagaggagctggtaccattccttctgaaactattccaaacaatagaaaaagagggactcctccctaactcattttatgaggccagcctcatcctgataccaaaacctggcagagacacaacagaaaaagaaaatttcaggccaatatccctgatgaacatcgatgcaaaaatcctcaataaaatactggcaaactgaatccagcagcacatcaaaaagcttatccaccaaaattgagtcagcttcatccctgggattcaaagctggttcaacatacacaaatcaataaacgtaacccatcacataaacagaaccaatgacaaaaaccacgattatctcaatagacacagaaaaggcctttgacagaattcaacacccattcatgctaaaaacgctcaataaactaggtattgatggaacatatctcaaaataataagaactatttatgacaaacccatacccaatatcactgaatgggcaaaagctagaagcattccctttgaaaactggcacaagacaaggatgccctttctcaccactcctattcaacatagtattggaagttctggccagggcaagcaggcaggagaaagaaacaaagggtattcaaataggaaaggaggaagccaaattgtctctgtttgccaatgacatgattgtatatttagaaaaccccactatctcagcccaaaaactccttaagctgataagcaaattcatcaaagtctcaggatacaaaatcaatgtgcaaaaatcacaagcatttctatacaccaataatagacaaacagagagccaaatcctgagtgaactcccattcacaattgctacaaagagaataaaataccctggaatacaacttacaagggacttgaaggacctcttcaaggagaactacaaaccactgctaaaggaaataagagaggacacaaacaaatggaaaaacattccatgctcatagataggaagaatcaatattgtgaaaatggccatattgcccaaagtaatttatatattcaatgctattcccatcaagcttccattgactttcttcacagaattagaaaaaactactttaaatttcatatggaaccaaaaaaagtccacatagccaagaaaatcctaagcaaaaagaacaaagctggaggcatcatgctacctgacttcaaactatactacaaggctgcagtaaccaaaccagcatggtactggtaccaaaaaagatatatagaccaatggaacagaacagaggcctcagaaataaaaccacacatctacaaccatctgatcttcaaaaaacctgacaaaaacaagcaatggggaaaggattccatatttaataaatggtgctgggaaaactgtctagccatatgcagaaaactgaaactggaccccttccctataccttttacaaaaattaactcaagatggattaaagacttaaacgtaaaacctaaaaccataaaaaccctagaagaaaacctaggcaataccattcaggacataggcatgggcaaagacttcatgactaaaacaccaaaagcaatggcaacaaaagccaaaattcacaagtgggataaactaaggggcttctgcccagccaaagaagctaccatcagagtcaacaggcaacctacagaatgggagaaaatttttgcaatctatccatctgacaaaggtctaatatccagaatctacaaggaactttaacaaatttacaagaaaaaaaacaaccccatcaaaaagtgggtgacacatatgaacagacatgtctcaaaagaagatgtttatgcagccaacaaacatatgaaaaaaagctcattatcactggtcattagagaaatgcaaatgaaaaccacaatgagatagcatctcatgccagttaaaatggcaatcattaaaaagttaggaaacaacagatgctggcaaggctgtggagaaacaggaatgtttctacactgttggtgggaatgtaaattagttcaactattgtggaagatagtgtggcgactcctcaaggatctagaaccagaaatacaatttgacccagcaatcccattacaggggtatgtacccaaaggattatgaatcattctactataaagacacatgcacatgtatgtttattgcagcactatttccaatagcaaagacttggaaccaacccaaatgcccatcaatgatagactgatacaacttagcacatatacaccatgaaatactatgcacccacaagaaaaatgagttcatgtcttttgcggggacatggatgaagctggaaaccatcattctcagcaaactaacacaggaacagaaaaccaagcactgcatgctctcattcataggtgggagttgaacaatgagaaaaaatggacacagggaggggaacatcacacaccggggcctgtcagggaatccggagcaaggggtgggagagcattagaaaaaatacctactgcatgcggcgcttaaaatctagatatccggtcgataggtgcagcaaaccaccgggacacatgtatacctatgtaacaaacctgcacattctgcacatgcatcccagaacttaaagtgtattttaaaaaatcagaaaaaaaaaataattaaccaggaaatatgtgcttttgaacataagaagttacattaaaaaaaaataagctcctccttctctttccacacctctgtggccactaatgttatatttattgtgtatctttccacctttttttcttcacctatttaaatacttttacaaattgtatataatcaaaaatgaaattctaagcctggcatccatttgaatgacccctcctctcggccaggagcattgtggagttaacctgaaaatctagtttaggccctgatgaaagagggggtcattatacctttccggcagtaatatcaacgcagaccgtaagtttgataagaaacatttactatctattctctctgaagactgctacctggaggcttcatctgataaaaccttggtctccataaccccttatcctaacccagacattcctttctactgataataactctttcaaattgccaatcagaaaattttaaatctacctataacctgaaactcctcccactttgagttgtcccgaatgtattatgtctccctaaaatgtataacatcaagctgtacgctgatcaccttgcgcacttgttgtcaggacctcctgaaacattcattgagacctgtctcagatattttgggttcataatataatatagctgtatgtgaacacacatacaggttgtgtgtgtgtgtgtgtgtgtgtgtgtgttttatgtgtatacacagatttttttttctagttttaacaaacatgaggtcatgctgtagacaatactctgcagtttgctctcttcagatcgaacacatggttctgaaacacaaatcacatcatctctgtcctggctataaccatgttttgctttccctttccctttgttaaagcaaactaaatatgacctgagaaggactctgtacttctatatttgagtccttgtggatgaaccataacctaacttgatagaaaagattgaaaacctaactaaggagtatgcaccagtaacgatagctgagtcttgaccaaccccagcagccatgcttcaaccactcacacactgttgagtgttcaaactgtgttcaaataaggcaaacgccaacctgtaactaatccagctgtttctgtacctcacttcctatttctgcacgtcacttccctttttttgtctataaatcttccaccatgtggccgcgctggagtttctctgaatctgctgtgattctgagggctgccgaattcgtgcatcgttcattgctcaattaagctcctttaaatctaactcagatgaagtttttcttttaacactttccaaaggccaaactcctttttgtcgcctgcttcttgctcatgtctccagcttactgccagtccctcttgcacactgactctggcagtactgagtggctttctgttccctgagtgcccgggtctcccacttctgctaatgtggtttcccctgagtagaatggctgttagcctggcttcctcccacttctctttggggactcagccaaaatgtcacttcccccttctccaggcccagtttggttggccagaccccctgctgcatcatagaacctatcacattgggttatacctcaattgtccacgttgcctgctagtctacaagctctgtgagggcatggatcacgtcttttcgggaggttaagtactgcatagtacttaacttgtaataggtgtgtagtaggtactcaaatacttgaataaataaaaggattaatgaataataaacagatcatccattacaaaggtcaaatatttaggaattaccctgtattctttcttccccacctcctcccattactatctaacctatcagaaatgctagtcagctctccttccaaaatgcaccccaaatcaactcacatctccccacccctacaatttccaccctggtccaagtaccatatccctttcttgggtcactggggtgttctcctagctggtctttatgtttccactcttgtttttttgtttgtttgtttgtttgtttgtttgtttaatagagacagagtcttgctctgtcacccaggctggagtgcagtggtgcaatctcggctcactgccaacctccgccgcccgggttcaagagattctcttgcctcagcctcctgagtagctgggactacaggcacccaccaccacgtctagctaatttttttgtatttttagtagagatgagatttcaccatcttggccaggctgttctcgatctcctgacctcaggtgatccacccgcctcagcctcagaaagtgctgggattacaggcgtgagccaccgcgccctgcctccactcttgtattaacagaatccattctattcttcacatagcagtcagaggaatccttaaagtttgttaatcagatagtagtttctgtctcagatctttccatggctttccactgcaccaggaataaagcgcaaaccccttaccctaacctgtctgatcttgcctacatttccaacttactttaaaaaataatcaacattccctattttcttatccctgtgttacactggttattttattgtcccagagacatgctaagtttgttcttgtctcagggccttttcatttgctgttccctctgcctggaacattcttcccctgggtcttcacatggctggctgctgcttgtcatctggaggtgagctcaaatgttacccctcaaaaaatcctgaatttctcaccacgttcattaaagtagtcctccttccctagccatgctttatcccacatagcacttcctgtaattttatttatatttttgcttttttgttttctttccctcactggaatttgagcttcccaaggacaaggggcttttctgtgccattcactgttgggtctaaggaggacctggcttatagtagatgctcagtaaagagttgcctaggaatgaacgcatctactattgacagtatgagagagtggaagaactacctacttttagaacagacattctgaattttgtcatggtatctgacatttactaagctgtgcggctttgatgaaaatttttaaattcttgatgcttatgcaaaatggtaataagaatttgccttgcccttaacttagtgggttcctgtgaagtttaggttggccaatggatgtgatgtgaaaatgtcctactaagcaaagtagcaacgtacgttatcagctctaaattgatgaataacttttaatgacctggaccacagtttctttcgtaccaaataaagcagatctctttggcctgtaactgggattccatccacagagccattcagaatcccctggaaccttcagtgcctcgttcagggttgcaaataagagagaagtgggcaagctttccaagagagagagagagaaagaaaggatgaaatagaaaaagatggtgctaatttaataactttaggcacatgagaacaatttccactgaggaaaaataacagcttttgggagtttctttcctggaaggcaccattttgaaacactgaattcccccaaagccgcaaatagagcagccaggatttcttgcatttgatgttggatgaaaatgcctgtgatgggggcagaactctgtgagccccaccagttaagggctccatatctgaattaatgaaagatataggacactctcattatttattcatcagtttttcagtggcgtcagactggctgaaactggttatagtttttcttctatttatattttgcaaaccaccaaccattcttaaccagtgagcccagcaaacatttgtggctgtttgggtcttgggttccttctagaaaatgagtacattgagatgttgcagaaaatggaaaagtaaggaaaaaacccaactctgttggatgaaggaggttattcacataaaataataaacagatgcctgactgtcctaacatctaagcaactgtttaaaatccttagaaactcttcaagggacttggcttttaccttcgtaatgtcctctgcagtgtcttgaacatgctagatgtttaataggattttaatagatcaataaaaatacagggattctgcattcatcatacttactttgccatcactgaatgttggtaaagacaatcttttttggatgtagcttcccaagtatcctattgttttctattcaacttatatttcttttaacataaaattttcaatgacagcaggccaaatttgtgaattttctcttacatgttttccattttcaattttcatagcttgacaaacattattttaaagtgcatttggaaaatatgaaaaagatgttttagaacttaacttttgtgatttaatattcacctgctatgtctctactgagctatttagatcttaaaaaagaacatctgctgttttctgattgtaaaattaatgcatagtcaatttatatagtttgggaaatattttagtgtattttctttaagtgtttatatatttttaaatttgaacaataaacttgtactttattttttgtttggagcacattttcttcacttaacacttccttgggaacatttctttttcatttctcattcctcaagattcaatctagaagatggacgtggtggctcatgcctctaatcccagcattttgggaggccaaggcaggtggatcacctgaggtcaggagttcgagaccagcctgactaacatggtgaaaacccatctctactaaaactacaaaaattagctgggcatggtggcacctgcctgtaatcccagctacttgggaggctgagtcaggagaatcacttgaacccgggaggcggaggttgcagtgagccaagattgcgccaccgaactccagcctgggcaacaagagcagaaactctgtctcaaaaaaaaaaaaaaaaaaaagattcaatctagaatgtctgtgtagtattgttttgtttgtgtgtgtgtcataattatttaactatgttcccagtattctatatttaaatcatttctaatttctttctgttattaaatctagtgcacaaatatcttcaaatatacattttagcaccaatttttcacaattctttagtatagatttccagaatataaaagaatagtgtgagagtataaaaaccttttaaggctcttcttacacgtttatgtttttcttttttaaaaaatgatttcttcagaattatgcttcgaattgccctgtataataattataagatattcacctatgttttcttctaattattttataatgtactttaacatttatcatttttacatgtggcatgatatagagattgattttttccctcaattattcagtttttttctggaagggattattgaataatttagtcattgtaaattatttgtatatgctatttccatctaatagtaaataatttcacgtatgtggctgtaattcttgattttatattccgtttgatgtacagtctcttattgctgaaataccacactgttgaaattatgccagtgttagcacttcaatgaatcaaactgtttagcgagcacctgccctttctatgccctatcttagctaaagattgagacatatgaataaaccaaaagacacagcccctgacctcatggatcttacagctgagcgggggagacagacgctaaccgaggaagcacagcaataactatatcattacaaatagtgacagccacaatgaaccaaaggcctcggattctgtgtctaagcaaaccattaaagagctctaatcagaagagctcagtgatcagacttcttctcctttctgtttttgtttaaaataaccgtggctattgagtgaagacaagtttgcaggtggtcaagagcaaaggaaagaccagtctgcagagaaatgatgactacatgatataaggtggttgttaatagaaaggaaatagattgatcaattcatgaactctttagaaggtagaactagcaatattagtgactgattaaatgtggaggtgaagaaaagacaggtgcaaggagtgacttgaagttttctagtctgagaaacagcaatattgtggtgtcaagtgcaaagaaaaagtagacaaaagatggaaccagatcatgagtagggtggaaatggaagttctgttttaaacagaagcacatgcagatggctgtgaaatgtgctgagctactgcagttgatggtgctagtccagtttagaagagaattgtgggctgggagatattgggaagagcaaagtgattagatcttataggagactagtaaaaagagaagcaaacacaagaccaagccctgaataaataattccaacctttagagattaggaccagggacctcaggagaatggaaaaatagcaccaagaagtggaatgaaaacagcaaagaatggagtcaccagaccaaagggtgaggtatttcatggaggaaggtgttgagtagaacattgctgagacctttggtaagagaaaaatgaaagagaatcgattggcatcaatatgtccctggagtacagagctgggcacagttgctcatgcctgtaatcccagcactttgagaggccgaggtgggtggatcacctgaggtcaggagttcaaaaccagcctggccaacatgatgaaaccccgtctctactaaaaatacaaaaattagccaggcacggtggcaggtgcctgtaatcccaactactcaggaggctgaggcaggagaatcacttgaactcgggaagcagaggttgcagtgagccgaaatcacaccactgcactccagcctgagcgacagagtgagactccatctcaaaaaaaaaaaaaaaaaaaaaaaatgtccctggaacacaggcaatagcaattttggtggccatgtgggaggtagaaatcagattagggtaaaagtaaaacctgatttttaaagaaaacgaaatcttgttctcatttgaagaatgttggccattgggagaaagaataaggtggtatcctaggaatccacttaaagattttttgttgttgtcgttgttgttgttattagagacattaaagaatgtttctcaactgatggtaataatccaggagaaagaaagagacagagagagtaaggaaatccttgagaattaaagtgaatgtgggatccagaacatgatgcctttgataagtggagttaaaatttctccacagtaagagaaaaaaggaatggaagcaaagatacgggaatgtccacctgtaggcttctttcttctcttcttctctatgaagtatgagggaagtctgggaatgggctagagtgggtggggaggatgctggcttgagggtcaaggtagccactgtggagagtgggagggaaccacaatgagagaaaatggcaatgggaagcactgccaagtgtgcctatgttaattatgtggcagcacaaaacctgctgcttaatctttttgttaaatattactttgttgttctcatctattttgttcttccataggaactttcaaataattttgtcaagttccagaaacaatattttgaggtcggggggagttgatggagtttgcattaaattaatgtattattctggagagaattgatgtctctacaatactaatccctctaccccaggaatacacctctgtattagtccattttaatactgctatgaagaaatacccaagactgggtaatttataaagaaaaagaggtttaatggactcacagttccacatggctggggaggcctcacaatcatggaggaaggtgaaggaggagcaaaggcacatcttacatggaggcaagcaagagagtgtgtgcagggaaactgccttttataaaaccatcaggcctctgagacttattcactatcacaagaagagcatggggaaacctgcccccatgatttaattacctcccagcaggtccctttcacaatatgtggggatttggggagatacaattcaagatgagatttgggtggagacactcaaaccatatcaacctaccgaatatttaatccagttttcttggctgtcccttggaagagttttatatagtatttatttcatagagctgctgcacctttctgaataaagactcaggacactttaatttttcctgttgtctttcattatcttgtccatttcgcctttttttctttaaagtctgttattgtattagatcattttttgtgctattattcatggatttttttttttgttttggggaggatatttatttagaagacaaatcaggtgatttctaaaatgtatgcgttttctgcaatatatcttcactgtgaataaattgttgcatttaatgcttttttccttttgttataatttgtgtgatattaattttgggtcatctgacttgtctcagtttgcatttgcctgatgtatctgtactcattttttgtcctttattgtttctgtgttgctttgtttaatcttgaatcctgcactctctatacagttggattgcatttcttttgacaaatgaaaagaggttagtctgtacctatttattgtaacaacctatgtttgattttattctttcttattttttctttccctattttgattttttatatatattttgctaaactgttatatgacatcctgattctataggatactttatgtttgaaagattctttttaaatttatatttctctaatgatgtgcatcataaatggcagaatttactgtttccctctatgaaaaattgactttttttcttttctttttttttttttttttggtagagatagggtctcactatgttgtccgggctagtcttgaatgcctggcctcaggtgatccttccattttagtctccagagaagctgggaacataggcatgcatgtcactgtgcccagccaggacaaatagactttttgaatgtttccacttcaattcatcttgcctgaaaatctttcatgatttttcaatttataatctctgattttcaacacagataattattataaaaccattgtgtattcttatgtaacccctatgcttttattgcaaaattgttttatatttgtagtctacttttaattccatattttattggtttttatgttctcccaccatttctgtaataccacaatgttcccattctacattttaatatatcatttgattattggtttatatcttgatggtttttaaaagcaatagcacatagatggtaccattttatttatttattttgttgagacagagtttcactcttgttgcccaggctggagtgcaatggtgtgatcttggctcactgcaacctccgcctcctgggttaaagcgattccgctgcctcagcctcccaactaggtgggattacaggtgcccaccacaaggcccagctaattttttttttttttttttttttttttttttgtatttttagtagagacggggttttaccatgttggccgggctggtcttgaactcctgacctcaggtgatccgcccgtctcggcctcccaaagtgctgggattacaggtatgagccactgggcccggccgatggtgccattttaatttttaatttttaatgctaccacactttaatttttcttgtctttctttatcttgtcaatttctcctttgtttgctttaaagtctgttatcatagtgtatcatcttttgtactggtatttatgggttttttgtttgttttttggggggaatttatttagaacacacatcaggtgatttctaaaatgtactcatttcctacaataagtatttgttaaaatttattgttcctcgtgatgtgtaaaggcctgaactctttttcctatatagctgaatatttgttttttttttttttttgagacggagtctcgctctgtcgcccaggctggagtgcagtggcgcgatttcggctcactgcaagctccgcctccctggttcacgcctttctcctgcctcagcctcccaagtagctgggaccacaggatagctgaatatttttataggtcccatatttagccggttccttgaatgaagaaatgtttattgaggactggtgtgttccataaatcatgtggatggattttttttttaattcttttactcccacctagttgttagaattctctcaaataataaggtaagggctggcaaatgtttatagttctttccttgctagaaagaatgatttaaaatctgagatttcccaaagtgctgatctgttacttctttatgtttctgttccttcttatctgtctgtagcactcagaagtgagaacgttggtgcttatcccttcttcgctagccatagtccattattgagtatcataattccaaaacaaaggtagaaagatgttattggggtggatgatgggatggctgaaataggacttaccttagataacgtctgtcttgtggagagaaacaggttttcagttttctggttagtacagaccttctatcactgaacttggcagtagatagtgggggaaaattagtctcatctttactaataatttttttttgttttttgagacagagtcttgctctgcagtccaggctggagtacagtggtgtgatcatgactcacttcagcctcaacctccccaggctcagataatcctcccacctcagcctcccgagaagctgggactgcaattgcatgccaccatgcctggctaatttttgtatttttttgtagagacatagttttgccatgttgtgcaggctggtctcgaactcctgggctcaaggtatccttctgtcttggcctcccaaggggctgggattacagatgtgagcctctgtgtctagccaaattcattcattcattcttaaataagaaaatatttctgcaagtgacaggttgcaatttcatctttgctccacatgtcttattaattgtgaaatttttctagtatatgtgctgccaaagtgagcactaattgtggaatttttctaaaaatctcatgatagttttattttcagctaagtttcttatgttttacgaagtttttttatttttaaaaatctagttttcattattttgatcagaaaataaaagatgctcacttgtgaacttctattgaaatttaacttaaactggaattccaaaatcctcttttcatactaacgttattaacagcagaatcttagagtacttaccgcattatttcctcaccttcagggataagttcagtgtcagactctttgtttatcaactcaacagccattcccaatctctcccccacactccccagcagctagaattgacccacagctggccaatgagatgttaaggaacatgcatttgcagtttctggcaaagattttcctctctaataaaatgaaggaaatatagagtgggatttctgacctcattacctccttttctgtatttaatttttttatagttaacaaacttcattttctagtatagttttagatttacaaaaaaatcgagcgcatagtacaaagaactccatatacttatcccaccccaagcctgtgtcttgccatccttttatcattaacatcgtccattaatgtggtacatttgttaagattgatgagccaatattgatacattattattaaataaagtccaaagttcacattaggatgcactccgtcttgtgaattcttgccaaatgcataatgtcatgtatccactattacagtatcatacagaataggttcactgtcctaaaatcctgtgtggtccacctattcaacccctctagctcctcctgaactcctgaccacactgattcttttacagtctccatagttttgcttttttttcttttcagaatgtcatatagttggaattacacagtaaatgagcttttcggaatgccctttttaatgtaaaaatattacttaaagttcttctatgtctttctgtggcttggtagctcatttctttatttcttttttggtagctcacttcggtttttttttttttttttttttttttttttgagatggagtttctcccttgttgcccaggccggagtgcagtggcatgatctcagctcaccgcaacatctgcctcccaagttcaagcgattctcctgcttcagcctcccaagtaactgggattacaggcatgcgccaccatgccgggctaatttttgtatctttagcagagacagggtttctccatgttggtcaggctggtctcgaattcccgacctcaggtgatccgcccacctgggcctcccaaaggtagctcacttctttttacccattacatggatataccatattttgtttatccattggcctgttgaaggacatcttggttgcttccagctttaggcaatggtgaatcatgtggttataacattcatgtggagtgttggatgttctattgtgagaaggcgatgcatggaaccaaggcagccatctttttatcatggggtgaaaatctgaggatgaaaagtgaatatgcgaaggatgcagagtggaaggaaaggaagaactacatccttgaggacacgtgggagccagtgggccaatcccaggattccttgtcaggtaagcactaagtgtctccatgaagtaggctactattagtaaaattttctgtgagttgcaacagaaattatcctaaccaatgaaagggctagtccatgccatgatttatctggttagcatattttattttctatagcacattttaatttatcttttaaggtaaaaaaggactttactattgtgtatttttaagtcaaaatttttctgactttttatataacatgagtcacatccagatattttactctaaattttaatagatggtaactcatgtgcagtaaatattaaattgcaatgactaatacaagagattcacattccaacactcacattagttctcgagaatgtggtttttaatgtggctggacgcctctgtcttttcttcactttaagctcagtctctttatcctatgccttgtgaaaggagggtgattatcatactcatcttcacaaattggaggctgtcaagcagtcagtgagtccccttggaaatactgaggcacactaaattcattaaaagtagccatccagaaggctaaaggagacagccttcagtgattaagaaagaaaatcagacttgtgactgccgcctgattagcaatctaattttaaaagcatcgacattcttcataaaaaagacatcaacattcttcaaacagttatctcaacactaatctgcactctaaacagcctaagtctattacgatcatgtctttttagtcagtctttgctgcctccaattcacatccatttgccagagctgaagcacccagtttaccccaacacagactttcatccaaatcctcacattaatggtcaccttctggatcaacacatgccaagctgttctctttttctcttaccaggctttcagacttaaagatttttgcattccctaaatctcctcttcctaaggttgaatgtcccttgtttctttaattgctcttcatgagacatcatttccagacccttgattattcgggtctctccccatgggatacaatttctcctgtcaatatccttcgttcactgtggtacttgagactccacatggtagtgtcctaggctgggctctcccagaagcgaccctcggaagaggattaaaatggggatgggtatttggaaggtgatcccaggaagcatgtgtaggaagtgaggaagtagaacagggaaggggaagacactaatacaggctgtgttactgagcatgtactgctatgagcaaggggggctggggcttgtcattcatgctttggatcactgggacactatatagagcttactctcagagttgtctcacctatgggtgaaggagctgggatatttgtccagtctcctatcctttattagtattctgtacaatctgataagcacaaacaatcataaacattcacgacctttttagtataatctaggattctttaatttgtttttcatacagctgaaccatatcctggaatcctcccagatacatcatcaacgaaaacccctggatttccttgtggatagccaaatctctgccaacttgtatatgagcaacttaggtatttattatttatgcatttattgttatatattattttatatatattatttacttatgcattgcggatctctctgatttgtttagttgggatgcgggactccaatatgttacgatcactcttcagcctgccatttccctgcttcaactttctgtttctttgcttttctttggcacgaggcacgtattccctgttctaacaccttttcctgccctgttacctcctggtcagctctcgggtctcagccctgccatgggtcaaatagttaacagtgcacatttcccgatgaagcctcacacattagaaaatgaaacgagacagctgtcacagacaacgcccaggaaagccattcatctatgttgccttctagttgaagaactcaaggaaactagatttttctgtatcaatgctcatgactacatctagattttccatgcaaagtaattaaattagtgtatgttgccgggttgcaaatttacttacactgtatttagatgtgcacagaaattctaacttctttattttctatgctgtatctggtttttctcagaatttcctcaccatgttggaaataagaggaaaaattaaatttgccagtgtttagtgtcgcagttgtttccaatgtaagttggttttccaatgactcagtctctttggaggaaatgcttgatctttcagattgttttctctttttccatgcttctctcttccctgattaatgcctctgggtgtggggagggctgtgtggagctggggcccaggatggagggagtgcagccctctctcaggactggaaactgttgaccttgtgcctgttgctatctctaggatctatggtctggaccatcggcttctggttgcaaatgccctgcacactgcagtctctgtcttgattgtgggcctctgtctgtccaccagtctttctaccatttttgtatccccacagtggagccacatggagcctcagaattctttggtttctctaagcagccataaagcctcataaatcctgcattaggtttatctacccagccaccttccttcagcaaggttgccctccagactccacaccatgccaacatgcagatgatggtggcttctataacaacatctctaggctatggcctgggaatcctgacattcttgaatttgtctgcatttctctagatatttctattgtttcctctatttgaggttttattgtatgaagggggaggcaagagcacacacatctgtctttctttcctttgtagatgagacagttagtgcttaccaaacattccattccactctcttgtagggtctaggtgcctatttggggtcaattatcacctccagcttgatacaactaagagccataaaagaacaagaaacaaacttttgttgtgatgagcccatgagatgctggagtgtgttactgctgcgtagaggtaatcgccccacacaaaacactctttcccagtctgctgaagcaagagggatacattttatcttcctgtctataaaggaaattctctggtttgtatcttctgttctaggaggtgaggtgcattaaagcttcattgctgagcctttctgggataagattcagccccactgggacagttggttggattttgaactaggattcatccccatgacatatactttcatacataattacgtatgtttttatatggctttctgaacagacacaaggaactatactgagtccaaatgctgcaaatcttcatgttaatggaatcatcaatgagccaaaaggtggtcacatcccttgcaaaaacatacaaggagtgtgttatgggctttgtgttcccctaaggctgctgaagttctatccccagcacctgtgattgtgaccttatttggagatggtctttgcagatgattaaattaattaagatgaggtcactcaggtggccctgatctaatacgactgcgtcgttatgaaaaaggaacatttggacacagagacaaacacacacagacagaaactgatgtatacactcaggagagcatcatatggagatggaggattagagcaatgcagctacaagccaaggcatgcctggagctgcctcaagctaggagagaggcctggaacagctcccctctcacagccctcagaagaaaccaggtctgccaacaccttgactttgggcttctagacttcagagctgtgaggcaatatgtttcttttgtttaagtcacccagtttgcggtcttttgttatagcagccctgtaatgagaacaggacaatccacactaattcaggataatggttactccagggagagaggtgaaaaagggatgggtgggagggaggggctgcagaaatctgtaacatttcttctctaggagaaaatgagatctgcatagatatggtaaagctttaaatatgtttgatctggttggcgtgtacatgggtgtcattttacctaatgtatttttcagtctgtttggaatacagaaaaagcccacaacaattgggatggaaatggctgggctaaggttcgcagtcctgcacatcaggctctgcttggctgtttcgttaaccttgcattccacggccctgccttttttatacatgtgaattttctgaactccccagaaattatagggttattcataatattcaccaccattcataatttaacatgtgaaaaatgtgattatacctttccatagcaaaactagcaacagcagtggcaacagaagcagcctcgaaggcacatgggaggatggaagccaatagcaagggcatttttattaccactgagctgggcagcttccagtggaggcggtatgagactctcccttgtggacttgaagcttctcagagcctgcagggagtgctgggagctgcgctagcttgacaacggataggccattttcccagcctcgacaaagaatgggagttcagagtaagtcatcagccgtataaccatcttttaactcagaacccagaattgtgtaataaccatggcatttaaaaaaaatagctctgggactgtcaaaaactatacttaatacttgttaggagttggtttttaattttaaaaacacatggtaactctgacaagtatgtgctttatatgtgctttgaccttggcaaagaaacctctctgggcgtcagtttcttcatctgtagattggggataataagactatcttttagggctcctgaaaagatcaaacgtgttaattatttatataatgtgtagcacagagttgtataaacatttatacttatttcaggtttaagaagcattttgacactttgaaagtactttctgcttatatgttaatttgagttgcaacatccctgtgttatggagaggaatgattaaaatcaccatcagctcttttttaaaaagaaagagaaaatgaagttcaaaaggcttccacagcttgcttctggtcacacagagagcaagtggaagagccaggtctgggccttagcttactgtcataccccacagacaattcacacaccactgaacaagaatggaaaagtctcggggcattgtagctcacgcctgtaatcccagcattttgggaggccaaggtgggtggaacacttgagctcaggggttcaagaccaacctgggcaacatggtgaaatcccatctttacaaaaaatacaaaaattaaccaggcttggtggtgcgtacctgtagtcccagctgaggtgggaggctgaggagggaggataacttgagcctaggagacgaaagttgcaatgagctgagattgtgccactacactccagcctgggcaacagagcaaggccctgtcaaaaaacaacaaacgaaacaaaaaaacaaaaaataaacaaaaaataaacaaaaaaaacagagagagaaggaatggaaaatatgttgtcatatctctttcatggccttgaattatgatttcagaagtgacttacttgacaattatttacagatgctttacattcatttctgactggttcccaaacacagtgtatcccaaaattagcataaaatgtctgaccctgcaactcttctgatgagtggttaatatcctgttgggaaatataccgaacaggaaacccgcaacaactcccctcgccacacactgccagtagccgcaacggcaagaaccttccctcgattgtctacactttgagttttgcttaaacaatgcatttgcatctgagacctagaggaaggcacatatccaaaatccctgccttgagtccttaactctgaaaaagtcttagtgatgagttctaccccttcctgccggtgaaggtaactctgatctgccttaacgggagtcatgtgctgttactattataaggccaacttcacagagctaaatagtctcaacaaatgtccagatgttcagataaaaaagaaagaaaaaaccactttagcaggcctagttgaaggccacataaatagtagtaaagctgctgaagctatttgcatttcgcacccaataatttcaggctctctctgccttaaattagagagtgtgattgttcagcccagccgtttcctaacctccacgggtgtgaacagtgaaaaaatacagataacagattgtctctgtacagggatgaacacagccatttttgtgtcttgcttttcctcttctcttctcattaactaagcactcaaggcctccgggcacgttctctgttctgtgcatgctgatgctggcccattgcgcgggggtgggggactgagctttccagcctctaatgtcagatgtcccactttcagaacataacttgtaaagtttcccaaaggaatgcggttcagggtgccctttggttcaaggcatgagctcactgtcttgcaagagcagtaaattattttgtgctgcagaggaattgtgtgagttttgaatggtaggctcataaactcatgatttataattaaattagccctcaggaaaatgtcccaagttatatctatttggctttctccagcttttttgaaggtcctacaaacagactaaatggaaatttcgcttaagaaattgttgtcataaaattttataggaccatctcagtggttaggggactgttaaacatccctgcagggggaaaaacaaacacaattagacacagactagctactctgtttggagggtgaaaaccaaagtcacgctggaaatgccacatccacagaagcacagcgtttggcctgagctggattttcggatgtaagattaccattaaaaatctgttgggttctaactttctattttgttattttctttcttcgctttttccttacttcctcatttttttcaataaaaaaattgttttgtttctttctcccttttaaaattatttttcatttttatttgttataaaatgcatataaaatgtagcatccccaccatttttaagtttacaagttcagtagcattaaatacattcacattttcacacaaccattattaccaccatccatctacagaactcttttcatcttgcaagctgaaactcgcatgcattaaataacaactcacaaagtcattaaataacaactcacaaagtcattaaataacaactcccatcccttatcctctggcaaccaccattctaccttctatctctttgagtttgactctctctaggtatctcatataagtattaagttggtgcgaaagtagtagcagtttctgccacttaaaagtaatggtagaaaccacaattacgtttgcaccaacctaatagaatcatacagtatttgtctttctgtgaccgtcttatttcacttatcatcatgtctttggttcatccatgttctagcacgtgttggaatttccttcctttttaaggctgaataatatcctctcgaaaatatatatcacatttttcatatctatttatccattagacacttggatcctttttctttttattaattagtcatgcctttagtattgagttgttttcggcaaagctgcaactaacagttgtgtagattgtcggtgcatgaattggttgcatggtgggtgatcgtgggtgtgagtgagctgagaaagctcagtttcctttgctcgtcatggcctcttcttttgagcctctcacagcacaacatgataacaacatgacaggaatatgagataaggagtttgtggaacaaagacacaagctacaagtcacattggattttcaggctaagaacctttattatgcagacaacaaatattccataatgtggcctatactaggtaagtacaaatacaggtgaagcatctttgtatggtacacacttcaatttgatcactctgtctaccctgtgtacaaatggaatgcactggacttttatttgtcttactgatattggcccattattattcagtctcctgttgtagcaattgtcactatcttcctcttaaagcttccatttgcttgtgctgaccatttcctatcttctctccaattgctaaagctcttatattctttgttgagcaggtgatcaacttaggtgacaaattcacacttctcaccagctcccttaaaactactgacagcaactgatgtctatggagtgacttactgtatctgtcaagagctctgctaggcacttaacatacattatgtcatttaatcaaaacaatgccttactttaactattattattgttcctgttgcatagacaaaagcccgagactcagtaatactctgtgacttgcccaaggtcacagagctaggcagggatggacctgggttcaatgacaggctgtatgacttcaagtcttatactttttgatttgagacactgccttagaacactttgtcatatcagaaagggagttcagctcaaaccctcttttgtgttagcaatattgaaatttacttatgatttaatatagttatttgggggggtattattttgtgtatgtggcttttttttacttgtatatttcatttaatttttttattatgaactcactgtttactattgttctatttttcccatcatgatcaacaatagaagtatgaaaactagatgcatagttagattttttaccatgaacagcagaactcaattcaaactgcttaagaaatacagatctttagcacttcacattttagtaagtccacaggatgatggttgctgggagtggttgatgttggactcgttgataccaaatttgaaatattccaggaggtaagggtctggcatccttgatgatggcttcctctcccagctgggagcaagatggctgagaaagccctaggcatcgtacctagacacacgatacccagagaggaggggtcttctcctctcgtgtctccttgggagtgggagagcattttccaggtgcattccagccaaattttcatcttttttcactggctacaatggatccaggtgcctatgctaaaaccggtatctgaaaaaagtgaaatagaatgaccagaattaggcagtcatttgggggtgaaactgatggtagggaatcaaattcagtgattaatatatgtgtatataatgagtatgaaaacatacaaatatgttgttattacctgataaggtagatagcatgatataggtattctatctgctacttcttttataattaaaaaaatccctttactggagctaaagtagttctatagaggtagccgtgaggctggagcctcataggtcatggagtgtttgggggtgggtgtagagaggagagagggtgggtgactaataggagagaagaagcatttcagggcaagggaccggcacaagtaaaggcagagagctggaaagaatagggtgtgcttctgggttgtgattgggtcatgattccctggtcacagttccctggcaagcgaggaatctggaagagtgaatatggatgaactgtaggcggccttgagagtcaggtctgaagaattggcctcgccagtgagtttatacccataaaagatgtgtacaaggaagaaaggaaaacctgaagcaaacaagacataataaagggcagtgctcaccataagtctactcttacgcatgataaaattttagaaatccaagtcccctctctttctagttaggttactgtgcctaagttcttcctccataagagtgtcaaagccgcgctggtgatagtgatcaaggatgggatggtacaaccccctgttctctaccctacatctccttcctccctccctccctccctccctccttccttctttccttccttccttccttctctttctcttttttctttttattttctttctccctgtcctcccctcctctctccttccttccattgtcttttctttactcaagggcactctttgtttctggaggtctcagtacagggccttgccactgtaggcacctggtgactgcttgttgaactcaatcgaagtcttcatgttatcttctcctttcttcctcttctttttatttagggtaacaatccctccatttttggtgactctctactctgcctaaccttaagtttttctaaggtactagggaaatttcttcatccagttatggattctcagggacaaaggtgtttctgttccctgtgttcagcatctcagctgtttgatggaatgtgtttctgaaatttgggttcttctgctagagtagctgcttaaagcaggatccacgggccttgggggagccaagtatgagctctaagacctgctatctccaggtagatagtgtgaggatcaaattagaggacacccagctggtgtcctggagaattgcttggtcagtgtgaggggaaaacccacacacattttggtcataaggggtgacttgcatgtgagagtagagtagggaaagtactttggtttttctctttgcaattgttatgtggtctcagaagcctctacccatggactcagatgccccatttcctcagggtgagggcagacgtagtcaagacagtttctgaatgttcataaaagttagtaataatgacatggtcctggaagctgaggctttctttggcaagagctggctttataggggaatgcttcttgagcccaaagaggctcaggatctggtaaacttggaggatagaattccttccataaaccataatacaccatgatgtgagagaacttttccagacccaaagcagatataggctaatagctggccataagagaaagactagagaggataagatttgcagttaggtgctggtaggtacctgaaaaggaatcacgtataaacttcttcactgaatcaagccccagaagagaccagagaatcctctgataatttgaggaagccacaagcaacctgtctcttacatttcaggtaaagtccaagaaagccaggagccttctactgggtctcccttttccagcttgtgaggtaaaacctcaaaaaatagaatcaatggtgtggcacggcttagagaagaagggggcacccagtgtcacttccctcttgagtctcccatgacctcagagtggtgccagagtgggtgtgggctacccgcacctccaagatgggtgtggcagggagtgtgggcaggttgggagacccagatgaaaaagctcacttgctgccagagagaggtgggaacacttcggcagtgcttgttactgaaccagacttgctttgcctattgcacagtatgccaatcactgagatgatgagttttgcattgcagaaagggtttattcacaaggcagccaagtgaagagactggagaacaagactcaaatctacctctctgaagatgggggttttagggatatttatgggccaggggagcaaggtggtatgaagcgtagggaaaggtgactgggggtaatgaaaagtgaggcaattggtgatcttcacaagcatagtcaagcttcatggctctttataggatgcatgttcataaaatagcatggttagcatgatctaaaggtatatttttaggccctctgatctcaaatggtcacctatcggacactcatgcaggcttatttgaagggtcggtggtctcagtaggcttgaagtgggtaagaactgactctacgttcctgaaaaacaacttaggcaactgttaccatggtgactcatacatcagagatgtcgtctataaggaagctagtgggaatttagatatatattgtttcgctacatcacttttagctaaatgggttttaaaatcgactaaaagcaagtgaccgaaaacaagtgaggtaagttaagtttgtggatccaaacagattagccttaggtttcacaggtgtggtgggggtacagccacaggcaaaaccagatgggaggagtcccatcagcattggattcctaggtgcacgggacagggacggactgtggtgtgcgacacccccgtgcaccaacacctgacaccgggtcactggccataagaagggaaggaaggatggtggcggaaaatcctggcagggctgggggtttatccaaaagacactacattgactctagaagcaactgagtttctctttaattggagagtttttatttttctgttttttgtttgtttgtttttgtttttgttttttgaaatggagtcttgctctgtcaccaggctagagtgcagtggcgccatctcggctcactgcaacctcagcctcccagattgaagcaatcctcttgccccagcctccatagtagctgggaccacaggcacatgccaccacgcccagctaattttttgtatttttagtagagacagggtttcaccatgttggccaggaaactctcgatctcttgaccttgtgatccgtcagcctcgtcctcccaaagtgctgggattacaggcaggagccaacgtggctggccaagagtttttgtttttctatcatcatcagaagggggatttgagagcttcattatgttcaatgatagagaaattaagagttcttttttcgttctgcccaagttcatgaccatgacatttacaccctctacatatggtcatcagtctgtaggtgaaattggcaactggatagtactcgctactattcctctggaccagctgagtcgtgggcctctaaatagctgtcatgagggagttcttaaaggtagagaatttaatatctgagcttctgtgtgtgcgtgtatatgtgcgtgtgcatgtgtagtgtatgtgcatcttgtgtacgtgtgtggtgtgcatctgtgtatgtatgtgtggtgtgtgcatgtgtggtatgcatatctgtgtgtgagtgcatgtgtgtgtatgtcaatgttgtcttcagtttcatgtcaagtatttcacgtatgcctacattttctatcatctttgtctcactttcacttgaggcaaatgatcaaaagctgattgatcatttgaagacatgaattgaaaggggctaaaaaagtgttacttttctgaataatatttttggctacttaaaaaaagtaaagtctttttaaaatggaggtgatagtagccttttacttcctgttgtcagattatattggaacatttattttttcacctctaagttcacagggcaaaggggttatggcttggctggacatttttcaggagatgagaagaccaaagttggtgaagattacacgtggcttgagaatatgcaatatgaagacatgttgagaaaatgatgtgataaaaagaatagtctaaagaaagtaagattcagaagggttatgaagacagttttcaagtttctgaaggtgaatggaaggtaaattaaacttgatttgtatattctcaaatcaaaaaagtagaaacaaaatgagacaactttctgcgttaaatagggcagtactttccatcattcgagacaagtcagacaatttcaggtgaattgcattccctaggagacagggtgagtggaacttcatcctaggatgccatggagaggcaaccagtagaagaaagcttcactggggctcctgtggttcctttcatcactgcaattttgtgatttgatgaaatttccatactatgtaaacttaaacaggaccatgacccactttttccctccttttacatctttttcctggcctgttaacaaagatttaatgacctactaatgcttgaggcattcttgaaaaaccgctgtcggattagcacttggttttaaaaaaatgaatttctttctttggtttgttgccttttcccccaagtaagatgcatggttgtgtttctcgccccacctcgactttgggaactgggcctcagtgagataagatttgcctggttttgtgtcctatttaaaatatgaactgaggtgaaggttgtgtactttgcacttagaagaaagactgttcctctagcacttgaacaattgcctctccctcccactctgagtggcacatgggtcaacttgcagagagctgtggcttccaaggttctcttcccatgtgattggatgtcaagagaggcctcaagcataataaccaggaggggaaaatttagaggaagtctgtggttctgatttgctacaccaaattattcttaaatcgagtcaaaaacatgggcatatttcagtggttctcaaatggaaaaaaaaattcttatctgggtttatgcagtggtatttgctacatgatttccagtttttgtaacttctgcaaagacagaagctctagtgtggaacatcctccccttttccaaacatcgaaatcctgtttatccttaaacacgactgagacactttcttcaacctccaatcagaggatatctcatcattcttagaatttccacagcatgttgtttatatgcctgtttagcataaatttcattatgcattgctctttccatcattgtgttctccataagactgcaaatttctcaatggcatcttcatctttatattcctcccatgatacttggtgtaatgcctgttaattggcaggtggtggtggtttgtggagtgaagagattaacgaatctgtcataactcctttcctcaccacattcttaaactgtgcagtagcccccagagtagggaaagacactaaagagagtgcatgaattaaatacttggcacttcagaataattttcatcaagttagcttgagagctatgaacttcatcgttagaccgtctttgttcttaaaactccccttgcctccgtacccccttctcactaaaagagccaatatctgctttaaaatcagcttcaaaatggaatgcctggatttacattacaagctcctggagaactagaactgtctcatttatttttttcgcccgatgcacttggcttcatcccaggcaattgtaggtcttctgtaaatatctgatgaatttctgaaaaagtaaaggaaggtcagaattcatttaaatgcatattttactccatatgacgccaaagcattaatgacaaaagtttttactttttgaaagttagcataggttcaacctagagaataaaagacacagactttaaaaacggtcattttggctacttctgactagtaggttagaattatggcagaggcagtaacaaagaaaaataaattaacaaaatgtggttgattctgtggtcttgtatcgacacagctaagtagaattgtgctagtgaataatgaatgtaggttgatggtcatctactgtttaatggtttccaaactaacatttaaatggaaatgagtggcttataccaaagtccaaataatacagttctcagccaacattgtatatgaatgttgattttggattgatgatggcagtgtattaataagaagcctgaaagattatattatctctgcgggttactcaaatagatttacacagaaaatcattttgtggaataataagggtaattttatatatggatagtgagaaggacattgtgtttggcatctggagacctggatcattttcctggccctgtaacaaacaacctctttcctctgagaacttttagctttgtccatctttctgttgctgtgcttgcaactacggtatagttaattgtgtaaatatttgtattccattactttttctaggtcgaagctgtcttgtttatctttgaattcacagtgcttagcagagtgtccagtagtgtgtatacccattacatatccagggaatgcattgaaatgaaggagttggataacatcattaatttctgcttctaatgttttgagattctcaagaacagagaaattcaacacacacactcacacacacacatgcagattaaattatgggctcagatttttcagggagaaaccatagaaggcatgtagtctaattttttccccatagatgaaaaagtatagcaagtcagtctctacaccttgcagatacaatagaaaccatcagacaggaactcctgtagttttcccatatgagacatataaccttgaccatcagtagccatctcatcctttctcctcagtagtgtaggttcaggtacctcttcctgtgtattccacacgccccctccctgagtctcttactttctcttgtatattaagattctccctctcaacttgggctgtccctctcaacttgggctatcccagtgtttttgtttttttgttttaaatattcttatgtgtcttctacacacacacacacacacacacacacacacacacacacacacacagctttttagatcccatagctctatccatctcagccaaacttcttgaaagagtggctcatattcactttctctctttcctcatcttctgctctctccatactcttccatctgccattggcctctttcatgtcattgtagtagcatttggtaaacctatgaatcacttgctgctgaaactaacagaattctggttgttccttctcaggtttatcttcctcaatgatatgtttaaaattgggaattccttaaggatcagtactcagtcaaattcctttctcattccataagctcactatactgttccatgcccatattttgtattttctcttaaatatgactcttagatttatacttcaagcccagatccctcatatctcatgccattttggctgcctcaaaggcatcaagccaaacatatcccaaaacaattcattatacagtatttctccctctcaccaaaaatcttttgattctctttcaatatttactattttttgaaggatcctgactatatattccttttcttttttttggagataaagtctcactctgttgcctaggctggagcgcagtggcatgatttccactcactgcagcctccgcctcctgggatcaagcaattctcctgccttagcttccctagtagctgggattacaggcatgtgccactatgcctggctatttttttttttttttgtatttttagtagaaatggggtttcaccatgttggccaggctggactagaactcctgacctcaagtgatccacccgccttggcctcccaaaatgcatatattcttataaaatctatatcaactcaccctcataacaagttcttcaacaaatcctattgagtttcatctccctaatatctttaatctgttatgtctcttcatcttcactaccaacaccctagtctaatctaccattatctatttcctggactgcttactgccttctaaatcatctcatcttctcttgactccttccaatccaatctccaaagttcagacagatagatactatcaaaaccactatctgttcaaacctactcataagaacttcaatgatttcccattactcttcagatgaagactaaaatgcttaaccaggccttcttaatcatatgtaggctagactctacttaattctctacttgatttctcgtaattttccttctcattctctgcactatagatacttgactttttttttgtcctgtatacctgctctcctccctccaaccacaatgctttataatgctatgctggcaactgtttaaaaattagattaaaaaaaaaaccactaagaaatctttctctacccctctcctccaaattcttatcttgtagaatttgcagttttattctctatggtgtaatattcccaacatgacaccaactggcttgaaatattcctgaaaattcaataatatgctgttatgagtaagtatggaggtgggtcttgcacacagtgatgactatttctttcacctagattctctattcttgttgctctaaaaatccccccttatttcgagagtccggctacatcaacacttcctcagggaagccttccttgatttccctgactaggttaaatcctcccaccagatgttcttggagcccatgcaatgcctgtgtaaggcccttattgcagtgtacttttacatttatttgacggatttgattaatgcctgtctccatgagtagacttttaagcttcatgagtaagacgaacatgtctgcttttggtcaacattgaattcccagggctcaacacattatctggcatatagtaaacactcaataaatatgtgctgaatgaatggtcaaaagggacttttgacatagagagcatcttggtttactgatgcctatttccacatatatctggaatgaaaatgtttagagtgaggttactaatttactcatagtgaactcaggtacgctttcttacaaatttaaacttaaaattgatctgcttttcctcaccaacctaaattggtttactggaaggggaaacagcatatttggggtgaatcttgttccttgagtctgattcataaattatcttcagtgtaattggattgtttgtaccttaaaggataaatgcttgagggaataggtaccctattctccatgatgtggttatttcacattgtatacctgtatcaaaataatctcatgtatcccataaatatatacacctactatgtacccacagaattttaaaaaataatcatcatcatacattatctttaattaactgcttatttttggataaattatagttcttccgatttctgtttccttcctttcctccttccctagatgaaaaatctgggtgcaaggtgaatggattgtgacttatgtggtctcttgacagcagaggtgagtcaggatcccagggtccacacagagcggttgtctcggggctgttaaagtggttggtttggcgccattaagtattccagtatctgcagggttattcaagctctgaatgtttactggtttggtcaatgccaccagacctttctgttgatcttggtgtgttgcagactcttcaaaatctggctacagccaagcccatgtgttcctggcccaaactgtctgcctttggcttttggccacagaatcatttagccattctatgacagccagctctggcaaatttcctggccagactttcagctaatgaagagacatactgggcttttaggttcccttccttgcttcctaggaaccaagggaaacttggaagagttcatgcaaaccttccctatgtctaaccatgctggggagctgaggtttgatctggtgacttagatctggggagaagaaatgtggacccacatgcaacaaactgcgccacctccttctaagttagtcttctcacaatccactggtactgcagacaatgttctcctccctcttcttgtctgtcaggaatttcccttaagtaagatatcatgacgcagtccaccaggataacctcttcatgtggaagatagaaaaacaataaaacataaaaatcttctatctcaagaaacctgaatctcagtattatctttgactacaaaattttgttttgaatatcataaatagaatattaattattttcattcttggtaaaaatgcttaggtcccaatgccactcccctagcaagtaataaatgtctttgaagaaattgcaaagaagaaaagaacagggatatatttagcaaacatgatcttccttgtcctttgataggaaagcagtacaaacagagtcatggaattggcactcctcgaattttcacagatccaatgtgatctggcccaagaaatagaaaatgctctccatgacttcacagccacttcccatcaatccatcctgagcactgcatcggtgcttttcaaagtttggttttacctttcattatccaactctgctctataaagcttccctggccccgtggagtgggggtagaacacaaagctttcatagctcccagggccctcggtaagtcatttcaaaatttttcccacctgacgttggaatgacctctgtatccattgaacgttttgaacttttacctctcggtgcttttcctaagatagtcccctcacttgtaatgtttctgtccaaatctcacgccaagcccactacctcctgaagctttccctctgtggtccagctcaaaggcgacagaacccacagagacatgacgagctttgccaactgttcaacactgaacaaggcattgattgatttcctagctgtgcctgtaatagttgggtgaccttgggcaaatccttttacctctctaggttggattcccttatcaagatggagagtgagcaggaagggtaaggtacagacagatatttaggtggcctctaagagttcttaagatcatgcattgaggacgtattctataactataacctaaaggtcatgtactttttaaagcattgaagtagtggccaacattccaaaactgggaggtttctgtgtccatttaaaacagatttggcaatattgggctggtatctccacatggcagcagtagattggtgctgagttgtttcccacctggtgggaactgggttctctggtgccccacatctctactgcacttttgttttttaaactacttggcacatgtagacactgggtttctagccttggctttagggagttcctggtgccatttcttacactaaaccatgatccttatattgttgtttcatgatttatgatttaatggcttgtttccccagataccctataattgtcttgagaacaaggcttaacacctttgaactctttctatgtgtcaggcactgttataaacacttcacatgtattaactcatttaattggacttctttattcctcacagcagctaggaaaatgtattgcatgtagttgctgccaaatatacttgtggattatttcatgaactatttggcaaaatgtcagactggagtcaggctccttgtgttcatattgtgttccactttcactatacctgtgtagccttgagtaaatggataaacttgtaaaccccaagaaatacgacactctgttagtctatctatttatctatctatcatctatctatctatcatctatcactatcgctttttagatataattttcataaaataaaatgcacagttcagtgagttttaacaaacatttaacaaatacacctatggaatctccactttaatcaagctatagaatatttccatcacacctgaaagttttctcatgtctttttccaatggaaacctacctttcttctgatttctatcactgtaaattaatttgaactgtcctagaactttatatacatagactcataccacctgtaattttgggggggctgggttctttgctcaacatatttatttccttttttgcagttggtatcagaagtgaaatgaagcataatgcttttgtgattcatccatgttgcaatatatgttagtggctcctcctttttcatcgctgagtagtattcccttgtatgaatatatcacaatttatttattcacttatttgttggtgggcacttgagttatttctagttttaagttactataaataaatcttctataaatatttttatgcaaattatttttggtagacatttttccccttagttttctcatctgctgagtgtgaccaaaaataatatccacctcttaccatcttctgaggattaaatgaaaacttgcatataaaaccataacatgaaccctagcacttaataagttttatcagttaattttatctattattgttttataaagaaaaataaaagttgactttgctgtgtatctaaagtattaactctcatttgtctataaacaaaaaataaagcatgccatttcagaccattctttatttgagatcatttgaactacacagatacttacatttgaattatctggataaaatctgcagcttgaactcaaaagtattcaattttgacttaaactcaagtcacgcaaacacatgcaaagttgaagggcgtgcaaaaccagtaattgaaaggacttgtttataagaagaactaatattagcctcataaaagaagctcacataattttctgaacttaaaatgcatcttatgggataatgttttgataagttgagtagaagtgaattaggaccatgtgcgaatatattttccgcaaaagggacttcaacgtttacatataatgaaaaaaagatgcttggggcaaacgcatttaaagctttgacgaactcacaacttgtaacagttgcataaacttaaaggccattactgctcagtttttccccaatgactagaatgccctctctcacctgtcactttgctcacagacacgtgagaaaaacacaccttttgcattggcagaagaactaagcctgacatatttcactagtaggtgacttaccagccatttgcctctgtcactacatccatttacattcttactgagtgtctaatgtttcccacctgccctttattttggcagggtctccaaggcaggcaggctagcaggtaatggaagccaccaatcctttacccactcttgggatgactctgttggaacgaattacagaaactaatgttagtcaattttctatatgtccattaccttgttcttgactgttataactgttggaaataatctattctaagtatacgtgactgaacgatttaaatggggtctaataaaagtaaaaatgcttttattaattaattcaaaaactatttgttgtacaactaacaggaatggtgctatttaggataattctttgccctctcagaccttaccattcaaaaggggagctaagtcacatgttcatagaaactatctataatcaacataataggtgcaataatatataggattcttcttttttcttcatctccatggccataaaaggtgagttacaaatctcacctagaagacgatcagaaaaattcatattaacatttttgtacattttctcatgttcctcttttttggaagttttacatatttgagataaactgtatcatgcctattttcactgaatattaataatatttttgatggaattaaaagtctttcaaaatataatttgtaatgaccatatagaatttaatcttatggatctactgtatcttcttgaaacatttcactgttgccgggtatttaggtttgtttcctatatttcatcattataaataaacatcttcacaaatactgtctttctatgttttacattagatatgtagtcttgtctcttggatatagaattaggggattcaaagtgtatgaatatgccagcgctctgggtacatattaccacatgttaccaaattgaactgtactgatgatgatcccacacgctttagtaatagctattagagttggaaagtctgagctaatctgataactataatatgatgttgcattgtttctagttctctgattactaatgaagtagaatagttttcatgtgtttattagttatttgacataggatgttatcatgtagaaggtcatcaatttgttgaataagtatgtattaaaatcctattatgatagcaaaaatgtggaaacaacccaaatgtccatcaatagataaatggataaaccaaatgtgatatatccatacagcagaatgttattcagctataaaaaatgaaatgttaatatattatagcatgatgaaccttgaaaacattgtgttaagtgaaagacaccagtcaatcacaaaaggtcccatctcgtttcatttcattttatgaaattggcacaatatacagatccatcaaaaaccaaaagcaagctagtggtttccagaggctggatgaagggaggaaggggagctaatcttaatagctatggggtctctttacggagtgatgaaaatattctggaaatggagaagcagcgatggttccacaaccttgtgaatagaccgctcagttgtacactacaagaatgtgaatttaatggtatgcaaattacataagaacctattacgcccaggtagtaggctattgttgggggtattagatcaataagatggagcttacatttcgtggagaagataactggtcatttaggggcacagaggaagtgcatataaccaggttgtggtactattttaaaacccagacaatctctcaagactaatgtgtggaagcacagttagaggcaggaatgtcctctgtggattttccatggtttctgtgttttgggtcctaactttgtcttctttgggaaattggacttttcagtttgtctgtcttgattctgttaagtagaagatgatcggatttatacttcatcgtggactgcatactacatatgaaaaattgtcatatctgtgcctcattttttaacattcacaacgtgatattaaactcgtttctcccctaggaagcaactcttggagaacatctttgtgctccaacacctaactccatgactaacatacagcagtttttcctttaatagtttttaaactttactcaagaaacaaataactcgtccatcacttgttattgtcccaagaagtataaataaacttagccaagttatttattttattttccttcattttatacaggtttattgtttgtaaatcctgccttagtgctaattatgttaaatgtgtttcatgatctgtaaaatggaaaggatttaagtgaggttgcatatctcaagtagcccagtaacgtagctgggctgggaatttgcaagaaagttgatccagagatctagttttagtgccctgcctctctcctctccctctttaacgggttgaacaacactatgtaatttatttcctttgggattcagacacattacctgaaaaatttagaacttacctgcattgtctacttcacagaatttattgcacagattaatttaaaaatgtgatattttgtaaagcagaatgcattctataaactggatcatcatcttcatagtcattatcatcatcatcattattatcttcctcataagtattatttcagatgccaactttgtttagtttttcaagagagacaaaagagaattagaatagaaaattattttgccttattaatcaaaaccaatacgagctaagggaatataggttaccatcttggttatgattaaagaagaacgtctcattgaactcatttgcttaaattatacaatacaatgtataggacaacagagtggtgtttatctgggtggactgatcatttgttgggctgatttatctgaacataacatagctaggctgtgctgtaacctctaagcagtgcacatctcattactttgtagtgtcccatgaaggttttctggaaaatgaggttgagttatggctgttcctggcaggcagtgtcattttcatttgctgtcagtgaatgctgaagagtgaggagtcacaagagcactatattttgtgtcatatgagattgccctgtgataaatgattactgtacagggataggatactaaactaatcagtcactggaggatgatattgataagcagctatcaccctgtggcagtgaagcagggaaggggctaaaggaacccatgctttacagctgcttttcagaactgaccgttaccttgtgatggaggaggaggaggaggaggcagtagtgatttgccaacatctttgaacctttcctgggtgacctgccatcaaggaatatttcctggactgcttgtggaaagcacatttcagggtgctagtaccatcttgtggagatggttaaataaattacgaatagaacagagaacatccgattactttgcctgactgtgaggagatgggtttgcgcctgctctttcttggccttctgcaatgagtaaaatcttcctaaggcctccccaggagttaagcagatgctagtaccatgcttatacagcctgcagaaccatgagccaattaaacctcttttatttctaaataaccctgtctcaggtatttctttatagcaatgcaagaacagcctaatgcacgggctctaggctgcactttcagagtccaattagaaaatgtcctcttcacttagtttctcaaaattattagaagatactccctggaggtgagttttaataaagaatgatgttccagccagagcaatcatacaagagaaagaaataaaggacatccccatatcagtaaagaggaagtcaaactgctgttgttcgccgatgacgtgatcatgtaactagaaaaccctaaagactcatccaaaaagcttctagatctgataaatgaattcagtaaagttacagaatacaaaatcaatgtacacaaatcagtagcactgctatacttaacagcaaccaagctgagaatcaaatcaagagctcaatcccttttacaatagctgcaaaatcaaatcaaatcaaatacttggaatatacctaaccaaggaggtgaaagacctctacaaggaaaactacaaaacactgttgaaagaaatcatagatgacacaaacaaatggaaacacatcccatgctcatggatgggtagaatcaatattgtgaaaatgacgatactgccaaaagcaatctacaaattcaatgtaattcccatcaaaatactgtcattcttcacagaactagaaaaaaaattctaaaattcatattgaaccaaaaaggagcccacatagccaaagcaagactaagcaaaaggaaccaatctggaggcatcacattacccaatttcaaactatactataaggctgtagtcacctaaacagcatggaactggcataaaaataagcacatagaacaatggaacagaataaagaacccagaaataaagccaaatatttacagccagttgatttttgacaaagcaaacaaaaacataaagtggggaaaggacaccctattcaacaaatggtgctcagataatcggcaagcaacatgtagaagaatgaaactggatcatcatctctcaccttataaaaaaatcaactcaggatggatcaaagatttacatctaaggcctgaaaacgttaaaattctggaagataacatcggaaaaacctttgtagacactggcttaggcaaagattttatgaccaagaacccaaaagcaaatgcaacaaaaacaaagataaatagacggaacgtaattaaactaaaaagcttctgcacagcaaaagaaataatcagcagagtaaacagacaacccacaaactgggagaaaatctttgcaaactgtgcgtctgacaaatgactaatatccagaatctacaaggaactcaaacaaatcagtaagaaagaaacaaataatcccatccaaaagtgggctaaggacatgaatagacaattctcaaaagaagatatacaaatggccaacaaacatgaaaaaatgctcaacattactaattatcagggaagtgcaaatcaaaatcacaatgtgataccaccttactcctgcaagaatggccataatttaaaaatcaaaaaataatagatgttggtgtggatgtggtgaaaagggaacacttttaccctgctggtgggaatgtaaactagtacagcctctgtggaaaacagtatggagattccttaaagaactaaaagtagatctatcatttaatccagcaatcccactactgggtatctacccagaggaaaagaagtcattgtatgaaaaagacacttgcacatgtatgtttatagcagcacaattcacaattgtaaaaatgtggaaccagaccaaatgcccatcaaagagcagataaagaaaatgtcatatacatatacacatatatatcacaaatgtgatatacgtatacatatatatcacaaatgtcatatatatatatttatttatttatacctcatggaatcatgggatacgactcagccataaaagggaccaaaataatggtatttgcagcaacctggatggagttggagaccattattctaagtaaagtaattcagaaatggaaaactaaacatcatatattctcacttataagtaggagccaagctatgaggatgcaaaggcataaaaatgatacagtggactttggggacttaaggggaagggtggaagggggtaagggataagagactacacattgggtacagtgtacgttacttgggtgatgagtgcaccaaaatctcagaaatcaccactaaaaaaacttatccatgtaaccaaacaccacctgtgctccagaaacctattgaaatagtgaaagaaagaaaaaaaaaagaacgaagtcccaatagcaatggactccaagggcatttcccacttcttttttgctgagacttcaagtccagaatcacagacattgtaggcttctttgactcataacattatcacccttccttataagttgggcttgaaattcttccattggagaggtcatttcttcgtgaacataatttctctgttcttctttcagaatgctaataccgatactttaatgagaatgaggatttttagatcacttttcttgcaacagaaaagagaacatctgaggatctgaggtcttaaagcaacgaacataaagcaaagtggagggatggtgtggcagaaagggaggagtggagtgtcccaaacagactttgctttctttccatgtcttccagttggtcctgcccagatgccttccaagtggaagaaggtgtatcaacttttttggagtggaaggataattgggggtagatctggacagctcccacactcccagccacaccttggaaaggacagcaggtgggtacaagctggcctcaccctctctaatgggtgccttccagatccacccaggaaaggctgaaagaactgggcacccatggatcaaagggaacctcccttgtttgtttttcactaggataatggagcagtttccacacccttcagggagctaatttcttaattccttcaatagcatgaataataatccatttgaccctgtttcaaggattagagctgcctagatgaaaggctatccgcattagagtgaggactgtaatcagggagagttcttgttccgctcccccacctccaggttttgtttcattacgcatacacaaaaatgagtacgccttttacacaaattagaaacaaaaagaacatcattaaaattcacaaaaataccaccacttttagataaatatggttgacaatttgaagcacagtctttaagactttttctctctataggtacacatatattttgcaaaaatggaatattttacgtatgctttgcaacctaattccctttatttaccttattatgcccatattttatgtgaagtagacatcaacatcatttattaaaaaatattcattttacctttattttatttatttaatcaattccatattattaaacaattaggttttccccctttcttctctcttaccttccatccacccaattatttatctatatctatgtaaccaaacaccacctgtgctccaaaaacctattgaaatagtgaaaaaaaatctgtttttgtacacatgtagctttctatcaatcaccctatgtgtatatgaatctatttatttctattataaattaagctgcaaaaaatactcttgatcacaaattatatgggtaaatgattatttccctagaaatgagatttattaataaaatgatgtatttaaggttcatatatattatatatacataaaaaatacataatttacatttctttaatcaatataggagtgttaacctccctacagtttaagacagtgctttctaacctatactactgattagaatcatctggagagtttagaaaaataccaatgtttgggccacaccacagatgaattacagcaaaatctctaggtgaaaggtccagggattggtatttttttttttttttaggtggagtctcgctctgtcgcccaggctggagtgcagtggcgccatctcggctcactgcaagctctgcctcctgggttcatgccattctcctgcctcagcctcccgagtagctgggactacaggtgcccgccaccacgcctggctaattttttttgtatttttagtagagacggggtttcaccgtgttagccaggatggtctcaatctcttgacctcgtgatccgcctgcctcagcctcccaaagtgctgagattacaggcgtgagccaccgcgcccggcccagggattgatatttttaaaagactccctaggaggcggagctagcagtgagccgagatcgcgccactgcactccagcctgggcctgcgacggagcaagactccgtctcaaaaaaaaaaaaaaaaaaaaaaaaaaaaagactccccaggtgatgctaatgcacgaccagggttaaggaagtcactggtcagggtcctcttcttccctggtactctatgtccctggcagacagcatcaattgaaaatctttcctcttgagtgtgaactcaccatctttatccttcacagcatggcactgcagatggcaaccaatgagtgacaaatgttgactgaaaggtggttgctcagattttctatgcattttctatgattgcgtgggattttttttgttggtttgtttttgtttttgtctaggtaacctatcaattgctgagaaatgctgttaaaacttcctaggtatattttaccaaattatctatttcttccttcaatttaattctgtcgatgtttgttttttgtagtttcaagctcgtcattaggtgtaaaccattaatgattcctatgtcttcctgaggaataaagtcttttatcatcaatatttctcttaattactggcaatgctctttttcttgaagtcttatttctgatttagtacaggcaatgcagtctttgtgtgcttatcgtgtgccccgtatgccactttcatccattttcatctatttagttttaacctaaccatgtcttagtatgtcttttataatctctatttagttgggtcttgctgttttaaccattttgacaaattctgactcttaattggagtttattgaagtctaccatttcattatttgttttttgtttatcctctctgagttttttattgttgttgttgttccttttttctcctctataccttcttttagattgtttaaatacatttgtaaatattccattttaattcatgtattagctctttagaaattttgcattatatttttggtagttgtggagttataatatagattcttaactttcacagtttacttagagttaacattgcatcatttcaggtaaagtgtagaaattgcatagatataattaagttttttttttttttttttttttgagacggagtctggctctgtcgcccaggctggagtgcagtggcgcaatctcggctcactgcaagctccgcctcccaggttcacgctactgtcctgcctcagcctcctgagtgtctgggactacaggcacccaccaccacgctcggctaatgttttgtatttttagtagagatggagtttcaccatgttaaccaggatggtctctatctcctgacctcgtgatccacctgcctcggcctcccaaagtgctgggattacaggtgtgagccatcacgcctggccaagatagaatttttaaataaatcaatcttttttatctcttactggaggaattaaagacctcatcctccctcctttccttctcctacttctccccccttctttcttttttgtaatcactaatttattttgtgcatttaaaaacacctccttacagctttctttgtttttgttttctttcgatttcccccctttccttctctcctcttttttttttttttttcagttgtattttccaatgttgcttaaacatctgcaatatattggttaagggcacgtactttgagtcagactgcttggtttgaattccaattctccacctactagttgtaagatcttgggaagtcaacctccctcagtttccatatctgtaaataggaataataacagtagctcctacttcacactactgtaatgattaatgaatggacatgcacagtgcacttaagatagtgacaagcacatcaaacagcacattcatttatcccgtggtgacctggaagttacatatccagttgtatttctaacagtggctacgcttgtttagaaaaataaagaaacatctacctctctaacagcatcaagaataaaataatgcctgttaaatctggctcaaacttttcccattttagcaaattatccattgttggttggaataatttttaaatccagatcatcatgatgatgtttataaatattctctttcagtaattcttttgactttcataatgtttcatcagcatgtcaacaataattattttatttcatcaccagctgtttttctgattgatttctctccacaatttattttatgcgatgtcttctccaaaattgatttctttctttttattcaatattaagttatttgggtaattttcttccaaataattttgggggatgggtgggtagggtagggtagagtgtagggtacctttgagagcttgcattgctgagaacttctctttgtttccttccaaatgaatgacagctaggttgaacatagaattcttaaattattgtccacctccatgcatcccttattctcattattttctagaatttagtataaagaggagaaatctgatgacagtattttttcctttgggggaggaggaaaagttaggcactttctattagagctttctatttctccatcttgctgatgtcacagtaattcttaaaatgaaaaagttcaccagagggcctatgtgtagatagaccctcttcttattgtaaacttcatttgctatattctgagactttgttatctggagctttaagcttatttcagcatggaaacctttacttctataatttatttgatgacgacttttaaaagggagttttcattgaataaattttgtttactctgcccatttacattactgaaagtcccagttcacattagattgagtttttatagtatttgcttaagaatccatgatggtgatgatgataataatgacgacgatgacaatgtgacttcatttagatctttccatgtaataggtcttctttcactgttgtatgttgtgttctgggacagcacagggttgctggtttcaacagcatctgagctaaagagagcagcaacaaatcactgcaagacctgcagcgaacaggtgccaagtaaccaggtgtaaatgggatccttaggatgttctggcttattccctgagtcattcctaatgactttgtgtaagtccatttacctctcttgcctgattttcatgtcaattggggaggtaggaatagaagatcttatcaaagcatgtgattcaatggaagaaagagcattctcaccactccatacttttccctaatataaaaatcataggaaactcataaatatctataaaactaagtgctcaatcagcacatatttcacaattgtttttataattgacttttaaggtattttatcatgaagtaaaatgcatgtgttaagtgtagagtttattgagttttcacaaatgtttacatacatgtaactataaccccaaacaagatatagatcacctccatcattccagaaagttctcttcaggccctttcccggccagtctcctaccttcccccttcttccacccagatagctcatgatctattttctgtcattataattgagttttgccttttctgcaacctcatataaatggaatcctatggtgttttcccttcagcaattgtgagtgtttgatccctaagctctgtatatttttttatttttgataatcatgtgtgttttatttgtagtttctttcttttttgcttctttgatgtgaatataccacttcatttgtttaaattattcatttacttatctaaatcacctctaaatttactcctcagaagcagccattgcaccccacatggttcttagcacaaagtaggtgttcagagtgtcttgaataaatgcatgcatggaaacaactttgaagacattcatctggatctctgttggtcatacttgcatctccctcctgtggaagtgcaaatcggagatgggcctagaaaatagcagtacaagtagatgatgccagatgcatataaattgttattgatatttctcctcctcttgggcagggtcttcttatggatccagcctgcccatgggcttgagtgtgggatgcagaaggaaatgtggaaagagatcagagcaattggtaagagcagggagaagagggtgagcagctctgtgaataagatagaaaccagagggaccatctgttggaggaaaacattccagacataggcccaagtctctgatccatttcttaatactgatgctaccttggatacatgatttaatcaccctcgatctccattgattcatacataaaaggacaaaattcgactagatgactttagtccttccaaccttaagatactatgaaatctatattatatagatgaataagagaaagaagtttaccatgcactctcaaaactctgccaccaaagcctgagatgactggttatttgaaagaatttgttttttaccaggcaaatgtgcagaaagttcatgttcttcttagattctctgtctggggttctggtctggggctgttcattaggcaggtgaacaggatggggaaatgtcaccactgggcaatgctgggttactgtaagaggaggtcagagcccaaaggtcaggtcacaggagactaggctgggtaagcaggttcccatctcaggaccagggagaggttcatccttcattggtgtttccacagagagtgtagagaggggactgttgcaaaacaaaggactaaatcctaagggcatatctcttagttcttaagggactgaatgttacctatgacaagaatgtatgtttcctccttagcggatatggatgcctgatccccagcttttctttttcagtttcatagatagggcattcgttgttggatccttcaggcaagcttgggtattttttaataggaatcatatttatattccccttcctgggacacatttttctccgtggcttggcttctctcaggtaagggggacaatgttcagacataaggactcaagatcttagcaaagagatcaaccttgccatttcagttagcacttagctaatcccaaacttggttttcttcccagagagaaacacagcttgctgtcaaatagtctgtagaccctaaatggctggttgtacccccatgaacactggagagcctgcttagggcattgctagttaggaaggtcagaagcacttactattgctgctggtctagtctttagtctgttactattactcaggatgtttcatagaaatctatttcagtggtatgttgcagttttcctcatattttttttcattgggctggagttaatacccttgaaagctataaaatatttaaaaaagaaacatgcactttcagagtagaccaagtgaattatagtcaggcccattaatatttttgcaatattgagtttgctatattaattgattgaacattacatgaattctcagtatcattgtaaaggcaggtgactttggtcttaagtggactactagggcaggaggtagtactgatatctaccactcacaggctctgtgtcattcattcggtttccctagggtttagcgtcctcaactataaaatgaagaagttgaaggtaataactttgagggtccagttctgtgtctagccaagatgctggactcaaacaactgccggccctctttgccaagagttatctggtagagaccaaagagggaaaatacaagaaagggaacaaagctgtaataaactctgggggaagaagtgtgtgtgtgtgtgtgtgtgtgtgtgtgtgtgtgtgtgtatgtgtgtgtgtagctgactgagaaaggttaaaacaggaaagatttactagaactcgtctcttgcttcttcatttccaatgccttcggacaaactagtacctgccaccaccccttctatattttgatctctcatccaggagtcctcaggagtgacattagggcaacgttaaagtcctgcactcgtgaaagccgaaaaagaacagatggggggatagttaactactatagtcatttagtaccaaaaaaaatgataggcaacccttttagctatgtgcttgcaacatggacaaaaaaacccacgagaaaacacagaacaaaactaagaagaaatattagatggaaaaactaaaatagcaaaaataaggcaaatagcaaattaaataaatagcagaaaaaggaagagattgaggaaatctccaagatggaagaagaaaaataaaaagaaacttaaaatatcaagaaaagccatgatatacgggggagagaggtgaactgttaaaacccagataatagacatcccataaatagagagactttttttttaacaaatgagaggtaaaacaaaaactttgaaaagtgagaaagaaatttttcctgaattaaaaagagaatggaatcaatgagtagatatatgagaaacctcatgcctagatacactgtaaggtaatctaataacataaagaaaaagaacctaaaactcttacagagagaaagagatgattaatataaagatataagattgatatcagaggccaggcaccgtggcttactcccctaatcatagcactttgggaagccaaggcaggtggatcacttgaggtcaggagttcgagaccagtctgacaaacacagtgaaactccatccctactaaaaatacaaaattagccaggcatagtggcacacacctgtagtcctagctactctggaagctgaggcaggagaatcacttgaattcaggaggcagaggttgcagtgagctgagatcgcgccattgcattccagcctgggcaacaagagcaaaactctatctaaaaaaaaaaaaaaagattcacatcggactttccaacagcaacactagaaacaaaaaacaatagagggaagtttagaaagacttaaagaaagaaaacttagaatatcacattttatttcattttttccagctcaattgaggtatgactgacaaataagaattgaatatatttaaggtatacaatgtgatgttttgatatacatatacattgtgaaatgattgccacagtcaggctaattaacacatcctcacacagttacctctgtgtgtgtatgtgtctacactcttagaaaatttcaagtataaaatttatgattattaactaaagtcgtcatgctatacattgtctccagaacttattcatctaataactgaaggtttgtaccttttgtccaacatctatttctcccattgtccagtctcagtcccactatactactctgcttttttttaagatttcacacgtagtgagatcatgcagtgtttgtatttttgtatctggcttatttcacttagcatcatgacttcaggttcattctatcgtctcaaatggcaagatttccttttattatacctgaatagcattccactatgtgtatatacgtaaaactagtataaacagatagaaagatagatagatagatagatagatagatagatagatagatagatatccatatgtatataatacaagatttatggtagccttatgatcctttgtatttttgtagtatcagttataatgtctcctctctcatttctgctttaatttattttagtcttctcccttatttctcaattagtctagctaaaggtttgtcaagtttaatttttcagaaagccaactctcagtttcactgatcttttctattacttttttagtctctttttcatttatttcttctttggtcttagttattgttttccctctcctaactttggacttagtttcttcttctttttctaattttttgaggtagaaagttagattgtttatttgagatcttcattttttcataatataaaattctttcattacaaaattctctccttgaactgcttttgctgcattccataagttttggactgctgcatttccattttatttgtcttaagattttgaaaagttttcctttttagttttttcttcaattcatttgttcttcaggtgtgtttaatttcaacatactcataaattttccagttttcttcctgttactgatttctagttttataccatgtggtaagaaaagatacttgatgaaatttctgtctttttaaatttgttaagacttatttttacaaaattagctgggtgtggtgccacatgctgtaatcccagctacttgggaggctgaggcaggagaattgcttgaacccaggaggcagaggttgcggttagccaagatcgggccactgcactccagcctgggcaacaagagcaaaactccatctcaaaagaaaaaaaaaaaaagacttattctgtggactaacatatgatctattttgaagaatggtccatgtgcattgagaagaatgtgtattcttctgctgttgaacagaatgttctgtatatgtctcttagatttatttggtctaaaatgtagttcaagtccaatatttccatattagtcttctttctggataatctatcctttgctgaaagtgtcatatttaatttccctcatattattgaattgctatttctcccttctgatctgttaatatttgttttatatatttaagtggactaatgttgggtgcctatatctttataattgttatatcaacttgataaatggactcttttatcattatataatgaccttctttgcttcttgtgaaaattattgattgaggtctattttgcataagtattgctaccctgctcctttttgttttttatctgcatattttctatccctttactttccgtctacgtgtgtccttcaagttgaagtgggagtcttgtaagcagcatatggttgtgtcttgcttcttttaaaaaaattgattctgccactctatgttttcttattgaagggttaattgattttctttttaaataattaccaatagataaggactattattgccattttgttcattattttctgaatattttgcagtttctttgttcctttcgtcctccttgctattttctgttgtggattttctgttgtggtatgctttgattgctttctatttatcttttgtgtatccagtataggttttttctttgtagtaaccttatggtaatcataaggtttacaccaaacatttcatagttataacagtattttaagctaacaacttaactttggttacataaaaagactctacactttatttacacacacacactgtcactttgttttgctgtcataatttacatctttttacattgtgtatccataagcatattgttgtggttatttttacttttattaatttagtttaatctttataccacagttaaaagtgatttacagggccatgcgcggtggctcacgcctgtaatcccagcacttagggggtccgaggtgggtggatcacaaggtcaggagttcgagaccagcctggccaacatggtgaaaccctatctctactaaaaatacaaaaaaaaattagctgggtgtggaggtgcacacctgtaatcccagctactcaggaggctgaggcaggagaaatgcttgaacccgggaggcggaggttgcagtgagccgagatcgtgccattgcactccagcctggtgagggtgagactccatctcaaaaaaaagaaaaaaagtgatttacataccacaattacggtattatttgaatttgattatgtacttacctttacccgtgagttttatatatttacatgtttttacgttactaattagcaccctttcattttagcttgaagaactccctttagcatttcttataagtcaggtatagaggtgatgacctcccttcgcttttttttttttttttttttgtctgggattctttatcttttatttttgaaggacagctttgccaggtaaaatattcttggttggtattttattttctctcagcactttgaatatatcattccactctcctttctattgcaagatttctgctgagaaatctgctgatagcttcgtgggggctctcctttatgtgatggtttccttttctcttgtttctttcaaaattatttgtctttgatttttgacaacatgattataatgcattttggtgaagttctttttgagtcaaatctgttgaaccttgagcttcgtgtacctagatgttcatctttcacagatttgagagatttttcaagcattatttctattatgagatttttgtacccctttctctccctgatttttcaaggaattctgtaatgcatatattagttctcttaatggtgttccgtaaatcccatagacttccttcattttttcattctttttttctttcttctcctctgactagataattttaaatgatctgtctttgacttcacaaattctttcttctgctagatgaagtctgctgctgatgttctttattgcatttttaattttattcactgcattcctcatctccagaatttctaattggttctttttaatttctatatatttgttgaacctaattttgttcatgtattgtttcccttatttcactgagtgttttctctctgtgctgtctcatagctttctgatctttcttcagacaatcattttaaattctttgttagtcaattcacaggtctccattttggggtgttggttactggagcttcgttagtttcctttggtagtgtcatgatttcctgattcttcatggtgtgtatagccttcatttgatttttatgcatttgagagaacaaacagccacttcctgtctttacagactggttttagtagtaaaacctccttctaccaggtccctggactgatgagactgcctcccagaattgaacatggctaaagctgggccacatggctgttgcacagtacatagttgctttcacatttggcaggcctgtatttgaagtcttgtgcaggcatgattccttccagatcccaagtggatagggctgtctcctggaccatgggcaagcagggctggagccagtcatggggctgtttccaggtatacagttgcgtctgcagacagtgtacctattactaggggcacagaagggtatggttcctgataagtccctgtgtgggtccctcggtgggtaggattgcctctgtcattgtggtagagcagagctggaggtgggtcacaaagctgcttcaggtcccagagtcaagaccaacatcagcagcctggctctgtgggcttagatgtgcatatgtcccaccagttccctgaacagacaggactgcccttggactgcagaagagtagggctggaactgagtctcaggaaaacttcagggtctatagccaggactgagttttgcaggcctattagcagggggacaatgggcatcagtgggttctttggtgggtaggactgagaggagggctggagccagatcaaagggcagcttcaggatttgcagtcaggtccacatcccagtgggcctgttactgagagcacagatataaatggcttctcccagtttcctgtgagggcagggttcataccagactggcaatatagtggggatggaatcaggtcagagccacttcaggatctgtagtcaggtctgtggcaagcaggcttgttaccagaggcatggacgagtatgactcctcttgggtcccttggaaaatatgctggttgcaaggccatggccaagtgaggttgaaatcaagtccatagagaggaggggctgcttttgatctgatgctgggataatattcagcaagtctgacaccagggctttgctctgcattctcaaagcagctctccctggtctctggttttactgccgtttttcaacctcctatctatattctaatgctcccacaaaggtactttttttccatggatggctgccaaatcactgcttgtgtgggaggctgtgagctgggaaccttctattctaccatctggcagatgtctgaacctccaattttatagccagccaaatggtcactcaattaagaggtagtgatataaaatattcttaggtatatagggtctcagaaactttgcctttctgagactcacattaaaaactctttgggataattttttttttttttttttgtgtcggagtttcacttttgttgcccaggctggagttcaatggcacaatctcagctcactgcaacttccacctcctaggttcaagcaattctcctgccttagcctcctgagtagctgggattacaggtgcctgccaccacacccagctaattttttgtatttttagtagagacagggtttcaccatgttggccaggctggttttgaacttctgacctcaggttttctgctcccctcggcctcccaaagtgctgggattacaggtgtgagccaccacgcctggccctggatgatttttttccaacagtgggaatagacaataaaaaatattacaagagataatttgacaacaaaaagatggtcaaataccttgataaaatttcttatcctttttttaacaaagaaaactaataccaagaagaaaaaaatttactacaataacttacaaataaaagtttagacattcacatgatatcaagagattcaggaaagagaccagagaataagagaatgtactaaagttcctgattgctaggctagaaatatagacatcatttattattaagtaaaaatgattgaaagtaacataggaaaaatggaacagaataaaataataaattaagttggtagaaataatcccaaatataacaacaattactatttaacaactgaagtcatcagttaaaaacaccaaagatttggcagatttgaaaataaataaaacctagattcaggttgtttataagagatatatctatgcataagggtacatcaaagatcataggtaaaatgatgaaaattatatacatgaaataaaaacagagaatattccacaaatcatttttttaatctgacatatcccaatacaaaaccagacagacattacatgaaataaaatgagaattacaggattattttattcacaaattagataaaaagttaaaacaaagagtttgtaattcaatgcaacactatacaaaagcataaagcactagaactatgtagaaatagtctcagtctacacaataattatttgatagaagaaaattgataactgtagtagttataaatttataacagtaactgctacagttataaattttcttatatgaaattattattaaaaattagtacattcaaagagaaaaattgtaatctcaacaaatgcagaatacagaaaaaaagatacaaattcaaaacctgttgaaataaaaaagaaggactagttatataggaataaaaacagtctttttaaatgtataaaacattagcataaaactcctacagcaaatatatgaaatggaaaaacattagacatatttttccaaaataagaaatgttacgtggatgcacactagtattcaacattgtattgaaggttctagccactgcaataaaaacaattgaggcataaaactttaaaatatggaggaaaacctgtcattatttgaagaaaaattctgtcattttacatagcataaaaagccactaattattaggacaattttgtaaagacaagcagtgaggaggaacttgctttatggcatatggcttcttattaaataataattattgaagcaatatagtattggcaccagaatagacaaattgatctatggaatagaatagaaaacttagatatcagcccacataagcatgatgttttggtgttaagggtggtgacatgtcaaattagtgatgaaagggggagaaaaaacttattatccaaactaaaaaataataataataatgcatccctcacaccatatacataagtcaacctgaaatagctcaagggttcaaataacaaaataaaactttcaaatacttagcagaaattataatatgaataaatattattttgaccttgggataaacataatttttaaaaataaggcataaaaatcatacagcatagaagaaaagactggcaaatttgactaacttaaaataaaaaaggattgtacactaaaagatgatttaaaaggaaaacaattatttacaaactatgagaaaatatttgcaaaacacagaaacaaaacattagtatcaagaataaataactggctgggtgtggtggctcacacttgtaatcccagcactttgggaggcctatgtgggaggattgtttgagcctaggagtttgagaccagcgtgggcaacatagcaagaccctgtcaccatttttaaaaagaataaatgactaatcaaataagtaataagagagtaaaatagaaagatggacaaaagtcataagtagaaattttacacataaccaataaatatgttgaagatatttgacatcattagtgatcagggaaatgctagtcaagagtatagtaggttatcaccttatactcattagattggcaaaaatttataagactaatagttccaatttataagactaatagtatcaagtgctggaaaaaaatatagatccttgagttctatgaggtacaattattttgagacattagttcccaaagttaaaaatattatgtaccaaataactcaccagttccgctcttaggagtacacgtaagagaattaagcatgcagcagaaataaacaagttcttaagttcttagtggcactgtttaccatagcaaaacaacaacaaggaaataatgcaaacatccattaagagaaagtagatgaatgaaatgctatattgatgcaatggaatattatataactaccaaaattgatgactgtagcaacattcaacaatctggatgtatcttagcaatatattattaagtaaaaattgtgagtccataaagattacatatagcttggtatcctttttataaagctataagtgtatatatttatacatattcatagtaatcttagaattatatctaggtacaataaatctgcataaaaaaagataggaaggccatgatgaatgcaggattcaggatgatggctacctcaggtggggaaagcaaagactggagaatcacatggctatttgtaggctactgctcatatcctagtttgtgctgggaggatgggatcatggatgcttattatattattataagttaagaaaggaatgaataaaggaagaataaaagggaggaaaaaagaaaggcaggctatgcctgaatcagtgataacgtgttgcaaagcaaagattattactgagctgatactttgcacccctgaaaaaaactcaaacaaatgcaaataaaatgacagggtatggctgaatgattttatgtgcttagccatccatggccttgctactcaaagtgagacccatgttccagcagcatctacatcacctgggagcttgctggaaatgcagaatctcagctctcctccagactgactgaatcaggatctaaatttacaagataccatgtggtttttgtgcacataaagttggggaagcattggtctacagcattctccatattggaagtgggagctatcacttggaatagctcagaaaccaagggtcttgatcatgcctgtccgaattactccctgccagtcttccacactgtgtacctacacagggcagcctaagaagtactgacagtggctgtgggattctggacaagctgccttggaggtttgcctcattggcagtgattctcaggctggcctgtgtagacatagggtttggaagaatggcagggagtgacccagatgagagatatgggtagagtctgtatgttacctatatagaccacctctacataggtaaagcccagccaagatgtgcatgcattatagtcctgctgtaccccagtcccaccccacagtaatttgattccaatacctcatgcattgttaaaaatcacaccccttaccaggatatacaattccagcagtcagaagtcatctttaaattccagtggttaataccattgcactgtagtttcttaacacgtggttgtttactggatgataatttagcatgtaataaagatgtcttttcaaaattgtggggaatagatggtttattcaacaaacaatgaaacacttgactacatgcctgcaatacttaccatcagaaccacacaattttacattaaaaattcatcgagacatcatggtgtcactgaaaaatgacaggtttctgaatcaggaagacttgccttttgtttgatcattcgttcatttagcaaatattgagcacatactatgttccagacacaaatactgactagctataccgtcagcagcaaaccaccttgtttgagcctctgtttcttcatttgtaaatacagctattaacatccacctcatggagctttggggaaaattaaatgagataatttgtgaaaaatatcagcctagggtcacattaaagttatataatttgagtatgtaggtaggttttatctccctacatgaattataagtgcaaatctggtcatctgctattccaccattccaggagagtagaatacatactttttgtctggccaagtggaaatttcaggccattcagatctatatggctaagacagaagtgttggaatcacaactaaatcacctggtgttatttgtgggattctggacaagctgccctggaaggtttgcctcagagcactaaaaactgatggctaatcctttgccctatgttgtacagaaaagcaaaggtgaagaattaggaagtgagaaacttactaaaataagtctctatcttagccattttaaagtagaaatagacaaactttgaatgtacaattgtgtggctgtattagtcaggattctctagagagatggaactaataggatatatatatatatatagatatatacatgcatatgatatctcatatatatatcccatatatatatataggagtttattaagtattaattcacacaatcagagggtcccacaataggctgtctgcaagctgaggagcaaggacagccagtctgagtcccaaaactgaagaacttggagtccgatgtttgagggcaggaagcacccagcgcgagaaaaggatgtaggctgggaggctaggccagtctaaccttttcatgttttttgcctgctttatattcactcgcagctgattagatggtgcccacccagattggtgggtctgccttccccagcccagtgactcaaacgttaatctcctttggcaacatcctcaaaaataaacccaggatcaatactttgcatcctccaattcaatcaagttgacactcagtattaaccacaacagtggctctgaatataagagctgaaagtatttagataataatttcactgtttttgttttgttttgttttgttttgagacggagtcttactctgtcaaccaggctggagtgcaatggcatggtcttggctcactgcaacctctgcctcctgggttcaagcaattctcctgcctcagcctcccgagtagctgggactacaggcatgtgccaccacatctggctaatttttgtatttttggtagagacagggtttcactatgttggccaggctggtctcgaactactgacctcaggtgatccaccagcatcggtctcccaaagtgctgggattacaggcatgaaccacagcgcctggcctcatttcactgtttattgaataatggatgttaaaaaaggatggaaagaaataaggataggaaaagacaggaagaaaggaaggaagacagggaaagaaaagaacaaagaaaaaaggaaacatgcttgttaaatgctcttacatgccttggcatctcaacaaaactaagttctcaaagcaggacctcaaaaatctctgtagcacatcactcacttgttaacttgttccccagacttgggctctggttaaatctgtactcattatggctattaaagaaagcattcatgtatctgggagtattcacgtatgtgaacaattgtctacaaccatggggcatactggtatatatttaggaataacacacacacacacacacacacacacacacacacacaccagataatatgtcttgtgtgcagaaaacacaagccctctacaactgttctttcctatcttttctttctttccttcgcttctttttcttgctttctccctcattttcttcctcctaactccccataaaggtgcaaatatgtagaattccctcagggggagggaaggtattaaatatttgtcccagtggcattaggatgcattttgtttgggcaatttatattttacaacacacatgtaaattactatgtagaatttaataacccaattgagtatcttcagttggagccaaactggaatttatttcctgatttctgaagggggtttctggcctcaaggacaggagaatgtctcacacatggcaacgtcttgatttaaaaggtttttctgcggaaagatcagttccagacttgcccagctagtagagcttgggagaagagagaagcggaaggtggtaatttgctaagaaaggaaggaaaaacaataatgtttatttgattacattttctcgtgttctagtggggggtaaattacaggcctaatgacttcagtgttgagggttggccctgaacaaagcttcctaagatgttgagggctttggaattaaagggaactcgcagagaggaaatgctccctattgtcgccactagggttttatgaacaagataagcatttccaataatactctttggctccaagcactctcttcctgctccccttatactgactacaaaatgagcaataaaagaagggtggaaaatatttgtggattacaaacaatgaagatattaataggctgcgttagagtttcaaaggcctttcattcttgatatgttttgagccttacaacagtgctgtatggtagtcctcttactcccaatttataggtgaagaaacaggctttctattccttgtatataatttattagttttttagacttgaactttgaacaagtgtgtcctcctgttcttttccaaagacctaatttcacgttcttaccacgggagttccaaatctttctttaaaaaagctctttgggccccaaaaagacaaagcccaaggggccttgagggtcatactgtactgggatggccactggccaggtaggttgacccactcctggctgctggttttaacctctgccccctccatctgtctggcccatgttggctcacttcctgccttcctgggaatctgtgctcaacaatggcagagactttgaggactggccaactggagtttctgtccaggccccaccatctaccagctgagtgatcttgaattatttgccactttgagtttctcattccttaccataaattcgggaaaataatacctacctcccatgattgttgtgagggtcgagttctgcaacaaatgacaggatagtaaaaaaaagtcccgaacacatggcaagagtccccccgggactggttttgtttgtgatattgctccaattcaggtttccaatgggactcatgactgtatcttaatgaaggtctagatttctcacttttttttttagggaatgaaggatgagaaacagagaaaaacaggcacattcagatcctcttgattaggacagaattgcttggaatttaccctctaaggcaagaaggaggcctttcttcttcctgcagagccaaatccttccttctgttaatgattctgggaggtcattgcaatggcagaaagaggattggattaaaaacccttgtaactcaaaatcccaactctgccacttagaatctgggtgacgctgagtcattcacttggcctctctaggcacatataaataatactttctcaaaagacttcaaaagagactaggtatgtagaaggtttttaagttataaaatagccttcaacataaagctgtattttctttactattgtaattattaatattctattctgtaacacacatatatatatttccctttaaaaattcttcaagaaaactaatacttaaaaatcttatttctccaatagactagaagatcccatcagcatggcccctgacagcctggactctgtgctcagggatatcagaggcatcttttctttatcactgggagatttgggggaatttctaatttggggaaccagatgtagaataaaatcatactcttcctccatctcagcaggaaataactgctttccaaacacagctaccaaccttcaaataaatcggtctctgtgaccaggtatttgtaaaaggttaattgaagttacattacatattttcagggaatctcaatcctgggatatgattgcacttggcgcaattcaccaagttttcatctcccttctgcttgcactcatctgatgataaaaagccatctctctattactggcattcgacctttaaatggcaaagagccgctttgtcatcagatagagtcatgaaaagccataaaggaagagacagagttagaatactaacgcgtccaaggctagcacattaaaaacttgtcgactcagggaggggcttcctgctagagaacaggggaaaacgaggcttccaaactttgagtcctttgctgcaacattctacatcatttgttgagagtctgctgtgtgccgatccattcatacccttccctctgtcagattcagacttaaaactctttttcttatgatttcatccatttcatccattcacatgttcggtatttaagtgaccatcaattatacctgtttgcgagttgcatgctaatgcatggtcctatctccttgggttattctaaatgcctcctcgtcatggacatggaaaattctttggcacttgaacattctctgtaggatcctgtcaggcagtctaaacagcaggcaggacactcaggagttaaggcgcatctctgccttcaaattgctgggcaactctgccaagtcacttaacctttctgtccctctgcttccagagctataaagtagaatgagtttaatagcatcacctcaccttctaatgggaatgttttcaggaataactaatgctagaccttgtaaaacacatggaaaaatatgaaacatgacatcaaatcttgatcttaacttgactttttctccagggctgtggggagaagagaaaagaggtaggaaaaagagaggattgtcacggggctatcaggtggactggagggaacgaggtatttctgtgctatattctaaacaaccagcttcttttatatttgtgcacactagaaatcaatatgtaatatctctggcatgaagggcagccatgtagtgcataaaaggagaatgcattggtcagtctgcaaattctagccttccgtactcaagttgggtgccccgcctgctatctcaggattcaaagtggcaactgtccctcattatttataaatccatcttcctattcctggtcatcagcatcaccctctgctgcccttcacactaacctcagcacagcaagaagttttcaccaaagggggcaccattacaagatgttgagttcactgtttcccaatcagccccgatgtttaaacttaagcctgtgccttagaccaccttcaaatcaatacatagaaatgcatctactaagtacataaaaactgagcaggaatttaagagatatagaatgataataaatagtacttgcagtcaagaaactgaaaatgggctaaggaaataaggctaccaggcatggaacaattcagacacgaaataaaaccacgtacaagtcaaggctaacttttgtggtacagactgtcaatctgtaggattttagagaaggaaaaccccataagggggagagttgtcaaaacaacctttgcaagtaaatgggaatagaactaagttttgtagatgggtaaaactgtgatgggacaagagaaggaggggaggaagagggcgttactgggagggcgggatgaactcaggtgtagaaaagagaaaaggctggtgtgagttggagggggccctgaggaggctgaagactggagtgaagatggtgtgttctgggggataatggtgttcagctggcaaaagccgagatgatcagggaatgtaaatgtttagttgaagaagtttaagagaggtgttacctctttttctatggactagactttatgaacactgtgacaggtatgcataactcagacgctttttccccttgacttcctaatacagtttggtgttttggaatctgcacctaagagaagttgaccttttagaaacgtagccttttcttcccatttctgcagaacctcctgcatagcatcatcattttgagcaaaccattgcatttgtaagtaccgttaaaatggtacgaaaatgtataataatgaaagttgatgacaggagggaccctaattctgtagttctataggatcagtttaacattcaggcagaacaggcaaatgcctattcatggtgtgatcccaaaattctggaaagtgcccgaagtgtcaaagaagaaatttctcccctaccttctggctgactgaaattccaccaacagcacttaatccctccagtttaaggagctgatccctgttaaaatgtctattttcataacagcggtaataatttaagatgctccctcaagctaccatcccatttttttccttcctttcactgtaaacttcttaattaagtggtcttcactcccactccccatttccttaccacccactttctccttaatctcataaaatctagcttctgtccccatctctcaacagaaaccattctcaccaaggtcaccaaagatctgctaatcaccaactttttctcagcagttttaacccttttgtattctgtcttctttgtaattcttctatctcagcatccaagacaccatgcactgagtctggttttgttgaggtagttgttgttcaatgcagccttccatgattcctcttatttctcccacatcctccataacactaatacttgtaaattgcattagtcattaaacgtattcatctatattatctttgattttcaaagctttatgaggtaggtatatattgccatttcaagaatgtaaaaattaaggctcagggagttgcttgtaagaagtggagctgaaaatgtaacctaggcttcctgactccaagcctgagctgtaaatgcagacacagcttaatgccattttcagccctcttctctttcctctatacttccccttacaacaaatccaggtgccccatagttcaacttgctcattcattcatgatgaattgagctgtgttccagggtattaaacatctggacatcaaatgtggacaacacatctctagctgaaatccagcagtacaggaaggcaaaatgggcagagttaagttctgggttaaaatcctgtcttattttctgttcaaagctgccattcccaccagaagttctactctcaatcccagacatttgattcatatcctggccttctacactgctatgcagttatccttttccaggaaatcttccgggatgccctttgtttgcttccccatctcagtcaacttgtacccagctcagcctccaaatgctcctgccccacagtcatctctactatgtttcagctgctccagtgcaacaacacttactatttattgatcacctgttgtatgctttatccatgtgataagccatcaaatacttaatcattcccctgtgaagtaaggattgttaccatctacattttacagatgaggaaacaaaggcttcaagagttaagaaacttaactaagacctgaagtttgtttttgttgttgttgtttgtttgtttgtttgttttgagacagagtctcactctgtcgcccaggctggagtgcagtggtgtgatcttggctcactgcaacctccgggttcaagcaattctccctgcctcaacctcctgagtagttggaattagaggggcacaccaccacactcggctaaatttttatattttttagtagagacagggttttgctatgttggccaggcgcatcatgaactcctgacctcaggtgatccacccgcctcggcctcccaaagtgctgggattacaggcatgagccaccacgcccagcccagaccccaaggtttctaagtggtagaggtgagagttagaccaactctgaatatgtactttgttcataacaccgtggctgcccagcacttacttgcatttccaaattagcatctgctacactgtattaatattttaagatattgttataagaatcacctttcccttaaattagaccataagcttctagaggcctgcttctcatgacatgaaattgtgtgtgtctatagctgtggataactgacatctagaggttccacagaaaatcaggaggattggtattactaattataagtgtatattctcaacaaatcttccatatcctgagatatctgaaataggtaaaaggaactcatactggctgaaaggagcattcagtgtccatcagccaagttattgcatcctccctctaaaaaaacaggaagggtattgatttcaacgttaggatcctgctatgagtatatgtgtatattggtatttaatgatactctttttttttttttcaagacagagtctcactctgtcacccaggctggagtacagtggcacaatgtagactcactgcaaactctacctcctgggttcatcagttgttgtgcctcagcctcccaagtagctaggattacaggcacgtgccaccaggcctggctaatttttatatttttattagagatggagtttcaccacgttggccaggctggtctcaaactcctgacctcaggtgatccacccgcctcagcctcccaaagtgctgggattacaggcatgagccacccctctgggcttaatgatactcttgaaagcattgaaatattagaacaactgggttcatcttggagactttgcgtcagagtgcactaccttttgtgacattctggaatggatccatattccttcttttgtatttatgcctctagaatcaatatttctaaccacaagatttttttctggtcacaatgcatcctccctgtcagcagggtcattgctgtgttttcacagcaggatactcagtatgtgtttgtatattacaagaagcactgattcaacttccattacacacttgctatgtcattatggggaaaagttaaatatgagaccttgaaagtattatcacagatggcttttctttctctctttttgttcctatactcatctaaattctggagatagtccagtcattttcacattatgttctttggaggggaagtttaggatttccaataggtgcataaaaagaacattcataataaggctagcaataaacaggaaaggatgttgtcttggaaaaggcatttttctaggccagtactaaagaaacgagaatccctaagtaaaagtgggcagctggctccttggtctctaaccagcctccactggtgttgaaattcttttagggtgtatgtcttttatggcttctttgggtccctctggctcccttcaatgagaaccaccaattattgtctctctctcaccctcccaggctcacttttcctctctgattccccagaagctttttatcccctgcctccttttagaactcaacttttctctttcatgcaacttggcagaagccccaaaaggctgaagattatggtctttctgtgtatttgtgtgtgaatctttgtaattatattctcaatcagaaaggaggaattttctttacacctaagccctgaagctcccctctaaaatttacaacttgcttctgactcaacctgctttaagttactaacttactaaattccaggtctagaagaacataattactttcaaagcatagttagaatatactaatactaaataggactatgaaatgtttgccccagttttattccatcatatcagtcaaaagagtcaaagggaacttcatatattcttagcatccctgaatccacaagtctaccaagaggggtgtcatttctgtatttaatttcccttggtttcttgggtaaaattaaattttgaatgtaaaataaaaccaacaatgatgattcagctgtcactgagtgtctactctgaaagattctgtgctaggcactaggggaaatagaaaaaggaataaaacacagccattattttcgataagcttagagtctattggagaaaggcaaaatgcatactcaaatcattgaatgttaagcagaatgttaaggaaataaatagaaggaagattacttctgctggggactcagttacggtcttgtgaaggaagaagcatgtaggctgcaacttaaaagagatgatgtcaacaggagtaatgatggatggacattctggttgcagcaagagggtgaaccaagatgatcaaggctataaaatcccagccatcatctaaagtagtttttaaaaattataattggctaaagcaagagcaggataaagtagaggagtgaatggtaagcctgaaaacctaggacgaagtcatagaagagtggtgcttaaatgatgtaaagaaaattgaactctcttctttggcaataagaaaccactgaaattttcagctatgttttaatacacttccttgataacagaaaattcactatcaccattggtgtagaattttgttaaaatatgaatatctatccaagcctcccttgaggtgcagaaggcctttttaaaactcataaacaaagaaagaaatcataaagggaaagaaattgataggatagtgatggaggagagaatgaagccaggcatccttggtggatgttaatgttctgtttcatggtgtgggatgccaactgcctctagcatcgtaatgatggatgctcagagcttgatgctggacagggtgttaggcaacatataccagagtctttttgttctctgaatggcattaccatccatggggggaatatctggcctctctcaaaaatccaagcatagtctttacaggcattctgtcggcacaacagcagactgttagcatacaaacagtcattaaccacaggctgtgggcaaagctaatccggagtgtgttgcaatccactggaaccaggaaatctgagctgctgctaataggtttccagccgctgagtccttaactggttttggcccagcttcccatccatgataacagggctcaatctttcttctgctctgttgtttggtttctgttagaggatttttttcattgggtggaagagaaatcatggattaaaattgattttcctccaaaaagtagaatgtcagagctgaacaaggatcctaagaatcttaatgctcaatcatcattcatacggggacactgaggcccagaagaaggacaggtcttgtgtaaagttatgtagtaatttttgagccatctctctatttctcaacacccttctctcatctgcttatgtttagttgatctgggcagcaatagttctttcctcttatttttaattcatattctccatttttacagcttctcttctggtcatctaaacttagaaaatattttctttcattctgatctttcccacaatacctcctggacatagccctccattgattacttgatgaaatttgtatcaagggaaagaaaaggactgacagctgaaggactttaatagttggattttttttttttttttttgagatggagtctcactctgtcgccaggctggagtgcaatggcgtgatctcggctcactgcaacctccatcccccggttcaagtgattctcctgcctcagcctcccgagtagctgggattacaggcacatgccaccatgcccagctaatttttgtatttttagtacagacggggtttcaccatgttggccaggatggccttgatctcctgacctcgtgatctccccaccttggcctcccaaagtgctgggattacaggggtgaaccaccacacctggcctagttggacatttatgatagcatgtttatagtctgcttagtctaatgggtgccaagggccaaccacagattctctgtcattttcagaccataaggaaaataactctggacatctgatttcaaaactcattcattcattgaataaagaagatatgagggcttctaccatgtgcaaggcattgagctggagccagagataggtcattctttttttgtctgtgaaggtcaaattgctctgacatagaacctgggtcatgtgtctacaccctagttgcaagctgcctccaaccaagactaataagggacaggatttaaaaaatacagaaataggggttcacatgctgagtggccaaaggaatgataaccaccccattgcagataagaaaaattattatccaaaaatgtcaattcttacattgcctattgacaggcataaagacctcaagactcaggggatttatgaggagactgcaagtaaaaaaaaaggccaagatgaaacattccgagtggcactcctgcccttcctacaaaaaagaaggcccctggtacatgcaaatttcacattttaatcaagagagattgttttacaaaattatcctctcacattgggaaaaatgcaccatacgagacatgttataagctatgcaataaatccacaaagtacttttctatggaattttacttaacataatgactctatgcatgaagatagtacaactgattatcagtgctttgtgtgtgtgtgtgtgttttggtgggggagtagcggtagacataggacaggcaaattaggaacaattctctgggctgaactctttttgattctttaatcataacaaaatgggaaaatttataattctaaaggacaatcttaatctgcttggtcaacagattccctttattagttattaacattttctttaccaatgctacaattaactctacacattcagtgttccaccaaaagggagataatttaatagcctaaacaggctgagctttggagatgggttacttttctcagtaatgaggctgagaacacaaagagatttttccaataaccacatagctgatcttttgtgtggacaactggacaatttttccagtacttaggagatattctgaccttttaaattttcttccttgggatagaaattgtggttatggacaattacatctctcaacttatttggggcaagtaagggcagttttcttcatttatgtatagttattacacaagcacgagttctaaacaaagagagattttaaacagaaaaattataagtatgccatatttcccacccttgttcaagctgtaaagccaattttctgtaaagaaactttcagttttcctgtgttgcttaagaacactataaaatattcatgtctattaatccacttctttcatgtaagaataaaaaatacatacacggtggtgtcaaaggatcatagttaccaacagggcattttgggggctgctcttttttgtttggacatgggcatgttagggaatgacggatatttaatgacagatatttaacttgatgaagtctatggtttttagtccttatgaaaatctcccatttttggaaataaggtagattgactagctctcctgaaactcttccaatatcaaacacaaattctagaaaaatatttatgaaaatgcttttaaatgcatagatgaaattgtaagaaagaaaaaatattcttctgaaggcaagaaaaatgtgggtgcatgaacccagggtgctaaggaagccctggagcctcgacatgcctggggcatctactgatctgagaggcccagagctttggcattaatggctccatccaagtcagggacaggagagaaaatctttggcctttgcaggagaaagaagtggatcacagaactcaacatgtatcagaagcacaggatggtgtatatgcgtaaggaaaggttgaactaagaaaactccacacgtcttgagcttgactctggataagaagggtaagggggagacttgtcctttaccaatgcatggatattgctggcttcacataggcctgtacactgcattaaccatacttacatggccatagcccgaagttgaaaattttaattaaaagtgaaccaggtttgataatagcctgaggaacctggcagaagcaaattctgttcctttataacaattaatctcaatccaggtctaaaagaatttccactgacagaatttaagcaaacatgtgcctacagtcaaaaataaaacacaagagaccactaggcacgtgattgagagtgagcagaacaaacaacagagccctacttttaaaaagttaggttggaattacaggatacagaataaaagatatacatgtgtaatatatttcaagaatacaagaatgaataacacttatgagtaagaagcaagaagctatcaaaagtagcagatgtgattttgacaaaaatattaaatatactaaaatatctgtatcttaaaatacatagaaggacacagatatatatttaaaattaaaactctgttaaaagagcaaacagaaaattggactgagatgaaaagtgagttaatgaatgaatggtagacttaaatgcattaaacagaatgttttacaaaaagaaaaagccagaaaaacaatgaaagcaacattgagagagaaggaagaaagagcaagaatggtccaacatactgatcagagtttcagtaatttactagaaagaagaaagagaatatttaaagtttgatgattgagaattttccagcattgatgaaaacacaggacttcttagattcaggaagtccaattaaattcatgtagaaaaaaaaaagaaattcacatgtagatgtgtcacagtaaaataaaatactaagtgcaacaagacatctttaagagccagagaaaagcaaacaaatggtaaagaaaagcaaattagcctctgacttctcaaaagcaacagagacttgtagaagacagtggtaaaatatctttagaatgataaagaaaattgccaatatggaattacatttccaattgagatatctttcttttttatttacttatttatttgttttattttactttaagttccgggatacaagtgcagaacatgtaggtttgttgcataggtatacacgttccatggtgatttgctgcacctatcaaaccatcatcttcgttttaagccctggatgaattagctatttgttctaatgctctccctctcctcaccccctaccccctaactggctctggtgtatgttgttcacctccctgtgtccatgtgttttcattgttcaactcccacttatgagtgagaacacgtatgttcgattttctgtccctgtgttcatttgctgacgatgatggttcccagcttcatccatgtccctgcatgatctcattcttttttatgcctgcatagtattccatggtgtatatgtgccacattttctttattcagtctatccttgatgggcatttgggttggttctacgtctttgctattgtaaatagtgctgcaataaacatacatgtgcatgtgtctttatagtagaatgatttatattcctttgggtacatacttagtaataagattggtgggtcaagtggtatttctggttctagatccttgaggagttgccacaccatcttccacaatcgttgaactaatttacattcccaccaacagtgtaaaagcattcctatttctccatagcctcgccagcatctattgtatctggactttttaatgattgccactctgattggtgtgagatggtatctcattgtggttttgatttgcatttgtctactgatccatgatattgagcctttttttcatatgtttgttggctgcataaatgtcttcttttgaaaagtgtctgttcatatcctttgcccactttttgatggggttatttttttttttttttactggtagattctggatattaaacctttgtcagatgggtagattgcaaaagttttttccctttcaataggttgcctgttcactctgattatagtttcttttgctgtgcagaagctcttcagtttaattagatgccatttgtcaattttggtttttcttgcaattgcttttggcattttcatcatgaagtctttgcccaagcctatgtcctgaatggtactgcctaggttttcttctagggtttttatggtttggggttttacacgtaagtctttaatcgatcttgagttaatttttatataaggtgtaatgaaggggtccagtttcagttttctgcctatagctagccagttttccaaggacaatttattaaatagggaatccttttcccattgcttgtttttatccagtctcttgaagatcagatggttgtagatgtgtggtgtcatttctgaggtctctgttctgttctattggtccatatgtctgttttggtaccagtaccatgctgttttggttactatagccttgtagtatagtttgaaatcaggtagcatgatgcctccagctttattctttttgctaaggattgtcttggctatttgggttcttttttgttgcagaagacatgattctatgtttagaaaaccccatcgtctcagcccaaaaacttcttaagctgataagcaacttcagcaaagtctcaggatacaaaatcaatgtgcaaaaatcacaagcattcctatacgccaacaatagacaaatcgtaaatgaactcccattcacaattgctacaaagagaataaaatacctgggaatacagagaacaaaggatgtgaggacctcttcaaggagaactacaaaccactgctcaaggaaatcagagagaacacagacaaatggaaaaacattccatcctcatggataggaggaatcaatatcataaaaatggtcatactgcccaaagttatttatacattcaatgctattcccatcaaactacccaatggtagtttgggtagttcttcacagaactagagatacctttcaaaaacaagaattaaacaaaggcattttctgataagcaaaatctgagagagttgatcagtgcagatttgcactgtaggaacttttaatgtttgtacttcagaaaaaagaaaagttagaaacacaaaggatagcaagtaaataaaagaatagtcactgggaaaaatataacaaacattcaatttgatggaataaacaataacaatcataacagctaatttattgagttaaaatacagagctgaaatactggacaataatatcacataagccagactggtcatttgaaattaaaattgtcaaagttccttatatttttcaggagaaatattagcatgcattttaagcatagttttaagtaacactatgctaaccatacatgttagtattctaaaggtaattactaaataatataagtgtggtttgaaatgtattttcaaaccagtaaagggaaaaaaaagaacaagggggaaaatatttcaattattccaaaagaataagagaaaggaagaaaaatgaaaatgaaatgaaagaaaagaagatatcctactggggtttgccccaaaagcagaatttgtaatgagggcctgtgtacaggcatttcatttgggaactaactgaggtagcagcaagaaaagactgggcagagtgaaacaggcaacggtgatggaaagccactctaggcatgcatcacttagatcctcgtcatttcaatcccaccaggcaccctctgaagcagcccgaagcagattctccagaactgtccaccaaagggatagaagaagagggtgtttattttctggtttctatccatcacccattgcccagagggtgttaactgcttctcaatgccaggtttgtgcacgcattagaataacgagcatgttctcctaggtatcccgtgtggtggcaacagagacactccaaggggaggaaatggaagactcacagaacagctgagagaagctgatatcaggttacacctgtgtagagctgattgccacaacaataactggaataaaatagtggattaatatgacacaaacctgggcactagagatgtctgatagaaacacggataggaagcaaaaatagggtggcagaaatgaaatgcatgtttatcggaacctgcaacaaatgcaaatgagctcgactctttagctgaaaggtacagatcatcactctagatttcaatgttagttctgtggtgtttacaagagatactttgaatataaggtcacagcgatgtggcaagtaaaaggaaggattaacattccctccccacaccgttcctgtctcttgtaggttgttacttccctctgcagaccctttctaattgctggcagccttgggccatgtttatcccactgagcttcagaatgagagttataagagaaattagaagtcttctttacaaaagaagaaatggagacatagggagaagaagaattctgttcaaagtcacaaaagcaggtagaagtagacctgggaccagacactggatattttaacttcaagtttattttctgttccagtacaccatatgtcagcaaacttttaaatgtaagaggtcggatgttgtagtctttgcatgccattaggtatctgttgcagctattcaaatctgccattgtcgcgcaaaagcagccacagacaatatgtagatgaatagccaagttgtatttcaataacattttatatacaaagcagctggattcagcccatgggcagtggtttgctgacctttgtgctacaccgtggttattttctcagttataccaaaaataatgtaacacagcatcgtgtccatatcacagctctccggagagtctcagccttgcattctggtgatactcaggtttcatctcaacaaatgagaaataattgcagccaccatcccgcatgaagacaaaaaggaaaaatgaaaattgaaaagatgtctgactgttctgtttcaagatggccatttgaaccagcaccttttcttccactttctcttacattccctggcagggcccagtcccagtggtcttctgatacggggagtcatgctgggttaggaaggggtatcacctcagtttaatatcactgtttggtaatacatttcctggacaccctccctccccacgtttctcagtctcctgggtaaagttccttctccctgtgaaggccatttgtttcctcattccagacaaacacaaaagaagccaccgaaacctacaacaataaacattttccttctttcccatttgcccataattatagatattttaccttttttattatatacattttctaatatttctacaggaaccaaagatttcttttttaagagaggagaaaaggggtagaaagggaggtgttcggtactgctgcaggaattactttgttatcccctttctgtgagcttctcctcctcctgacatgacaagggatggtttgtgcttgttaaaatacaaaaattggcaccctggaagctaaaaaaggacagaatttaatttgccctttgtagttcctcttttttattccttttggtaatatttcatcaacactgtgcttttctcaaaagtcacagtgtattattctttgtttttgaaaaaacaaaacagaacaaagcaaaacccaaagctaacagcccttctacaaagaacaatggaaaatgaatagccacatttcccagtgatgattattattatgaatctttgtgagaaaatgtcactggggactcagccatggaattgaatttctcttccaaattttattggcgcttattgggtctgacagtttgatgagagaattgcagattatttagaagctcttccatcaatgataggattcagtttgataaaaagcatttgttgagtgttagttacaacctcagttactgtgaggaggaaagaaaaaaattaaatctgctgccttccctccaagaggggacgaaatggagaaattcatgaaagacattaatctttttattcatttaaccagaatttagtcctcagtcactttttacacagtcaaataagaaaggtagaaatcattgcagtacagaattgtttaaacagagtttctcagagggatgcagaaaaattgggtgaagataactgggaagtttttcagaagggattaaactgtcttgatagagaaaggcaagggagattgtatgttcaaagaatcacctccatggctataatatcaaaaccaacagggagaagatgcacatttattccctcctctgagtgctctagattttttttttaagaaaaaaaattgtcttccaccaaacaggaaaatgaaaaccaaacaaacaaaatccactttcccacccatgcctttgagtgtgggctggacttagtgactagaatagagtgtggaaagtataaaaaccttgactgtatagtggagaaagctggcaaatgccctctttaccagataatcagttaacatcaacatcaataagacatattgatttccaatactctccatatgatgtgatgagaaggggacttcatctctgtggtattcgttccaaaacccataaccctactctaagcatgagaaaaacatcaaacaaacccgaattgaggaacatctgaaactttctacaaaatacctgaccacgatgcctcaaaactatcaaggtcatagaaaacaaccaagggctaagaaactgtcacagaccacaggagactgtgagccatgagctctaaatgcaatgaggtatcctggatgagatcttgggacagaaaaagaaatgcatggaaaaaaaacgagtaaaatctgaataaagtctggaatttagttcatgataatgtacaaataggaaagtagtgtgacaatttgtagttttgataaatatgccaggataatgtaaaatgtgacaatgcggaatggcaggcaaataggagagcgcaactctctgtactctgtttgcgacttttctgtaaatctaaaattatttcaaaataaaaagtttaaaatggccaggtgtggtggctcacgcctgtaatcccagcactttcagaggccgaggcgggcagatcatgaggtcaggaggtggagaccatcctggccaacatggtgaaaccccgtctctactaaaatgcaaaaaattagctgggcatggtggcgcacgcctgtagtcccagctacttgggaggctgaggtaggggaatcgcttgaacccgggaggtggaggttgcagtgagccgagatcatgccactgcactctagcctggtgacagagcaagattctgtctcaaaaaaaaaaaaatagtttaaaacaatatagtcccttaaccattaattaaggtatgaaaataggtttgttatccaacatcataaaggcattattataataaacctgtacatgagaacaatagccccatgtgtagcaaatgctaaagatgaactctatgattttcagagcatctattaatattcatttgaactttagttggatccaaatgatttaccacaggaggatccagtacaactattctactgcacaagaaaaagtaataaaatatgacgaatttgaaaaaatagatcatctctaacagccagcttcccactgaaagtcacatgaagacaacacagcacacacacagatgaaagctcccagcctggaatcactgagacttatggccaaccagcctagccaggactctgcaaggcagctggagctgcttgggcagccatcagaaagagtttgcctcatgacatgttcgtgtttcttgttggaaaaaataccactggcaaaagtaagaatacacaggtatcagaaagagtttgcctcataacatgttcgtgtttcttgttggaaaaaagtaagaatacaccttcttccttcctcactccctgtgtctaaacaccatgcagaaaacaggaaggctttgcttttcttccatgaatgctggcttcccagacaattatcgaaccctctgctcttactcagacagtagctacagaaaataagagaaaagaaggcagtcgtggggactgagcatgagaacctccatcttggaagatattttcctctttctcttactttctacacccaatgtaaaggagatagtgttggctcttctgtcagtacacatccagaaccctggcaacgtttcttttcttctctttttttaacttttaagtttagtggtacatgtgcaggtttgttacataggtaaacttgtgtcacgggggtttgttgtacagattatttaatcacccaggtattaagcctagtacccattagttatttttcctgatcttctccctcttcccaccctccattctccagcaggtcccagtgtgtgttggttccctctgtgtgtctatatgttgtcatcattcagctcccactcataagtgaaaacatgcagtatttgattttctgttctgttagtttgctaaggatactggcctccagctccatccatgtccctgcaaaagaaacagtctcattcttttctgtggctgcctagtatgcagctattcatggaaaatgaatagccacatctcccagtgatgtgtatgtgtaccacattttctctatccagtccatcactgataggcatttaggttgatttcatgtctttgtttactgtgaatagtgccgcagtgaacatactcatgcatgtatctttataatagaacaatttatattcctttgggtatatacctaatgatgagattgctgagtcaaatggtatttatgtctttagatctttgaggaatcgtcacactgccttccacaatggctgaactaatttaccctcccaccaacagtatgtaagtgttcctttttctccacaagctcaccctagccgcttttcaacacctccattagcagcactatggtcctagccaacatcatctctcaacaggattactacacaggccttctacatactccctctattttcagtctcagaaactagagtgatcctgctaaaatgggagtgacaccatattattcctctgttctaaagccttcagttgctccccatttccttcaagcacaacacacgccccttatagtaatgtaaaagacctcacatatctgaccactgattacctttctaatcacatctcctactcatccccctcttgctcattcttctctagcaaatggagctccttgccattcctcaaacataccaggtttattcccaccccagggcctttgtactgccaacttctcctacctggagctttcctttgttagctatttgtatggttctctctcttcctcttctagtctttttctattaaaatattcaatcctattaatatttcaactcatgcctacatatatttattccttaacccccttattctgctttaattttataacattttttctatataatttatttctttattaagcttattatttgttatcaataataatagatcctaccaggatgtaattccatggggagaaggatgtttgtgttttgtttattgagcaatgtttagaacacaatagacaccaaacatctttggattaataaaagataatgattcacaaaagtaagagatggaaagaatctctcagaagagtatgttggctaatgcagtatattatatagatgggcttagatattaaagaaccaaggaatgtgggaaacaatgccccttagtagataggagttgtccagtgaatagagctgcctatgtcaatgtggcttttcactgcaggactgtgaaatggatttggccgttaaataagaattaaggccaatacaagcatcctgcctgttgacagtcactctatttggacagtccttgttttagccaacagtgatatttaaaaaaaaaaccataaaaaattaaaagacaatctacaagctgccacaagtatgctgatgaaatttcaggcaaataatattcttaaaatataaagagttttccagtctacacaaaagacaatgtttaataccagaaagcaaaaacataagtaggcaaagtcacgtgggattaaaaagtccaatttttctggtagccaaagaaatataattcaaaataatgatattgtttgtctgtattctatattcagatttaaaaagattaaagaatatgcattataaaattgcccacctggaagggtgtgtcaacatttagcatctttaggtttggtaatcccatgtaaataaattagcatttattctagggaaactatcatggaggcattaaataattgagtaaccattgttgttcattggagccttgttcataacctaaaaaaattgcaaacaacctacacatccatatgtcattggtgagcacaacaaatagctcagtgaaaaggtgtatgcaatctagagtcattgcttgtatttaaatctcagccttaccccttccaagccgtgtaactttggacatactagttaatcattctaaggagccacgaaatagcatgtaatattttaagagggatgagaagttcgatgttattggaccacagatttccttggtagggatggcggtgggaatgtgtttgtgaaaatatatggggtttaggccttgcatggtgcatattgagcgtgaggagcaatggaaggatctggccaagggagtcacttgatcatatatgtatataattttgtaaagattacttcagcagaattgaggaggattgaccaaagcaaggtgatgccagagaacgcatcagttgggaatgtctcatagcacttcagccactggatgtgaggataatgggaaattgtgtacttcctcacttgaattcaatccttattgtctttcccatcaaaatcaataaacaatgggattagagaatgacagtttgtgtggagaggaggggaacattcagatcaatttttgaaatggtccaatgattctagatttgctgtgcaaaaggctacctcatccccttccctggtaggactcatccaggcagctggggttcagtgtcatgttgagctggataacagcctagatcatttagagagctgccctaagcaaactcttgctagtagttttcatgcttttgttttctcctcttaaacattaagcaaacaaacattcagcaaacaaacattcatttttaacacattcttatctctgcccagtggtcagggacagctagcactggcccaagcagtggtcaataagaagttccaaatcttttactgctaagggatgtcaatgccttactggcaagctggagacagagcttcaagtttgagagagaactgtgtgtggggtggtggggccggggtggggagagatgggaatagataaggagggagggagggaagaaggaggtagcaattaaaaagagagaaagaaagagctccaaaaggaaaactgtgtaagaccaacttcagaagtcagcagagccacttcctgcagctctacaccccactgtagctatcacacacagagaacaacattcagtcgtctttttgatcagttgctgaggcttcaaaatgtgcctttgaaacacaaggcaccatctggaaaaaatgacttccagtcaacccaaaggccccacagactgaggagccctgctccgagccagctgtcctaacttgccatgttgctgcatcgcccggtgctccaggctgagcctccatgaagcagtgggcctaggatgtcctagagcactaaatccctttcagcagactttgcggcatagaagagaatatgttttgaatgtttgcgctttgggatttctggatttcattaaggaaatatggggagtcaggtacaaatcaaatgactccttggcataacttcattttcctttgtctcttctctcttccttcccaccattcacctgttgcataatgcaggggctgcttgggaagtgtgtaaattaggattaggtgagctgccaatatctaaaagttatcatggcttaaaaaacttagaaatctatttgcctcttatgtaaatgaggcaggcagccttggtttactgaaggagttacaatagaattaatagaaaccaatgatcttttcaatgagtaagtccaccattgctaggaaaagagacttttttctcatgatcaaagataaaggccagaactccaacaatcatattggagttctagatatcaagacgaaaggagggaccaaaaaggaaaggggcaaaggtcacatgttagcaatcttttaaagacatttcttagaaagtagtctccttcacatattattgaccagaatttaaacatgtgctcaaacataaatgcaaagacaattgagagatggaggctcagccaaaaatctaagatattaagaaagaggggagaatagaaactgtgttctctgccatcgttcaccattttggctactaaaatactcatgggaggccttgtaatgggaagaatacattcatgctcgtcttcaaaccagtaaacacagagtgctgcctctagctgcaagtctaagatctgcaatcttctatttccaatgccacatgctgcttcatgtagactggcaacttctatatttaaagataagttagctcttaacacaccataatacacaaggaatgacaatgaaatctcccactttgaaaaatgggagaatgaaaaccacagcagtcattggtttctagccatgataaaacgctgctaggcataaatagtgtgtactcctgatctggaagtggagaaccttccttggttggagaatattcctcgtgctgggctctgggaagaatgttccctttttttccatatttttgccagcacttgttatcttgtctttttgatcatagccatcctaacaggtatgagatgatatctcattgtggcttcaattcacattcccctgacagttagtaatgttgagaaccttttaatatgcctggcagccatttgtatgacttctttggagaaattctattcaggtcttttgaccaattttaaatagggttatttgttttcatgctattgagttgtttgagttccttatatatttggatattgactccttatcatgtgtatgctttgtaaaatattttcttccattctgtaaggtgtctggagaattttctttgatgtacaaaaggtttctagtttgatttcagtctatttttgcttttattgcctgtacttttatattcatgaaatcattgtccacctcaatgtcatgaagctttctccctaaattttcttctagtatttttatagtttcaggtcttacatttaagtctttaatccattttgaattgactgtgtatacagtgtgagataagggtccaatttaatttttctctatatgatattcagttttcctgacaccatttatcaaagacactattctttcccaattccataacctttgtcgaagatcaatagcaataaatgtgtggatgcatttttgggacctctgttgttttattggtctatctgtctgcttttatgccagtaccatactattttgattactataacttcgtagtatattttaaaatcagatggtgtgatgtttccagctttgtctttctgctgaagattgctttgtctattgaggatcttttgtggttctttatgacattaggatttttatttctgtgaaaaataccattggaattttgataaggattgcagtaaatctgtagatcttatagggcagtatggacattttaagaatattaattcttccaatacaggaatacagatatccttccatttatttgtgtcatatttaattttctcctcaatattttatagttttattgtataggcattttatctccttggataaatttattcttaagtatctcagggtttttcaatgctattgtaaatgaaatgattcccttcatttcttcccaaaaatatattccattttaaattttatttatttgaacttcttttcctttttaattagtttagctaagttttgttccaaaaaagaaatgaaggaaataatttcatttattattgttgttagtgtgtagaaatgccactaattcttgaatgttgattttgtatcttgcaactttactgaattcatttattagttccaaaagtgttttgatggagtcttcagcattttctatatataaaaatctacaaacagaatattttattttttcctttctcatttgggtgtcttttctttctttttgctggcaagttgctctatctaggacttccagtattatatagaaaagaagtggcaaaaatgggcattcttgtctcagtcctgatttcttgattttggagaaaaatcaattctttctttctttctttctttctttctttctttctttctttctttctttcaactgttgaatgtggtgttagctctgggcttgttatatatggcctttattatgttatggttatttctttctatagctaattttttgagagtttttattacaaaaagatgttgcattttgttaaatactttttctgtatctattgagatgatcatataacttttatccttcattatgtttatgtggagtatcatatttattaatttacatatgttaaactatccttgcatgccagggataaatcctgcttgctcatggtgtatgatccttttaatgtgctgtcgaattcaatttgctagtattttgttgaagatttttgcatctatgttcattaggaacatttatctgtaattttatcttcttgtatctttggctttggtattaagttaatgctgccctcagaaaatgagtttggaagtgtcaccttttaattttttggaagagtttgagaaagattggtgtcaatttcttctttaaatgttttgtagaattcacttgtgaagccaataggacctgggcttttgttaattgggaggtttttattcactgattcaatctccttactcatctttggtatgttgagatgctctatttcttcatgatttagtcttggtagattgtatgtttgtaggagtttatccattttttctatgttatttaatttgttggcatacaattttttacaataatctcataatcatttttatttctgtgacgtcagttgtaatgtgttttatttcattttttgttttatttattccttttctttttagtttagctaaatttttgtcatttgtttttcttattaaaaaacaactctaagttttgttgacgttttctattgtttttctgtttttctattttatttatttctgttctaatcttttttatttccttccttttgctaactttgaacattgttcactcttttttcagttccttgagatgtaactttaggttgtttatttgagatctttcttcttttttaatataggcctctatcatatgaagttccctcttagtactattctcgctgagtcccataagttttggtatgtattttaccctgaagtattttctaatttattttgtgatttcccccctttaacccaaagtttcttccagagtgtgttatttaatatccacatacttgtggatatttcaattttccttgtgctattggtttctaattttatttatttgtggtcagaaaaacacttggtataatttcaatcttttaaaatttgttagaacttgctttgtgacctaatgttgatttattctggagaaaaaatcatgtgcacttgaaaaaaaatgtatattctgctgttgttgggtagaatgttctacatatgtctgttagatctatttagtttatagtattattcaagtttcttattgattttatgtctggatgtcctgtcaattattcaaattaaggtattgaagtgttcctactaccattgtatttctgtctatttctctcttcactaccatcagtgtttgctttatatatttacatcttctgatgctgggttcatatgtatttatcattgttctattctcatgatggagtgaccctttcatcattataaaatgtccttctttgtctcttttggaaagtttttggcttaaagtctattttgtctgatataagtatagacacacctgctgtctttttgttaccatttgccctcaatattttttttttccatcccttaaaattcagcctatgagcatccttaaatttaaagtgaatttctttaaacaacatgtagttttgtcttgttttttttttttaaatcagtttgttcaatctatttcttttgattagagagtttaaatcatttacatataaggtaattattgatagggaagggtttgctattggcattttgttagttgttttctgtcatttttctaggtcttttgctgtctttttgtctcttgctgtcttcttttatattttgttgattattttgtattgatatgctttgactattttctctttttcttttatgtaagttctattgatactttttgcataaccatgtatggttatcttgagacttacataaactatcctatagttacaatagtctgttttaagctgataacaactcaagttcaatgacacacaacattacactttaactctctgcacttacacttgatgttattgttgtcacaatttgcatctaattgtattgtgtatcttttaacatacttttagttatagttatttttaatacttttgattttcaacttttatgctagaattacaagtaatcacagtattagagtattctgtatatttctatatatttatctatactaacaaatttcgtacttccttatgctattgtgttgctattttacatcttcttgtttcaacttgaaaaacttcctttaccatttcttataagacaggtctactccctcagtttttatttgtctgagaaagttttatctctcctttatttctgaagaacagctttgctggatatagtattgttgatttctttttttgtttcctcactttaactatagcatcccactcccttatggcctgcaaagtttgtgctgcaaaatctagtgatagtcttacagaggttctttcatatgtgacaaatcacttttcttgctttcaaaattctttgtttttttacaatttgattataatgtgtctcactttggatttctttgggttcatttcatatggcgtccttttccttccccagatttgaggaggttttagccattatttctttgaatacacattctgttcctttctttatcttctctttctggaactcctcagtgtatacattgatttgcttgatggtgtcccataattctctaaaaatttcttcacttttttatatttttaaaaaacttttacacctctgaagtattttcagtgacctgtctttgagttcccggatttattctgccttatttagttttctctgaaactctctagtaattttttttttcagttcagctatcgcattcttcagctccatgatttctatttggtacctttttatatttctatctctttgttgaaattcttactttactcatgcattgtacttttggcctcggtgagcagccttaggagagttatttgtagttatctgtcaggtaaatcatataacttcatttcattaaggttgattcctggagattgatcttgctcctttgtttgaaacgtcttagcctagttcctaattttccttgactctctgtgttgatgtctgtgtattagataaaagaggcacatcttcctgtcttcacaaactggtcttgtacaagagaaaactcccaccaatcagcccagccagaaattatgagggactcttccaactcttttctaccccagagagaaggaggaagctgtggtttttgtctacttgttctatgctgagctacaatgagtgggaggaactgtggtatctaacagctcaacctgctgtctccattctcccccaggtagctagattctgatggatccatcagaactccaggactgccaagaaaaatactaattttgggggcagccccagcagagctggttagctaatcaataaaatcctaagtgaaataaacaatacaacttttactaaaagtttcaattaaaagaggttatcatttttacttgctttgaaaactaaggacagcgaaggcaaggaagtgagtatttaaatagcttaagtctgtgttttgaatttactgtgattgtagtgactgcctactaatagaaataatagaaaagattgtaaattggtttcattagacatcaaataggctatttatttagaggtatcaaagttcaagtggcacccatgattgttgtaccatattatgcattggttggagggtttatggttcaagaagttggactgagcacacattttccttctctttcctaataatttactgaacagcatggggtgggtttatgaaagcacttacaatgggggcaggtttaggaaatggagcacagcagtggagtaaagacttttcaaagttttggaaaagagggaaggttgtttgcttaaattatagtagaggaagtctcagtataaaaaatatacaaggaaatgactctactaagaaaaaggaaaaaaggcagatattcccagacagaaagggctcaaaagtttatcacttatacatcaagatgtacatcaacaaaatgataaaggaatctgtgtgtggggtgtgtgtgtgtgtgtgtgtgtgtgagagagagagagagagagagagaatgagagaaaaagagtgagtgagttagatgcaaaagcagaacaaacccaggagtacaataataaaaaaaattctagaataacctctttacagtggttttagaaagccggttatccgaacctgactgacagctcaagggctctgagaatactgtcaagaataatttcctataaaattaaaataggaaagctggataatttcaattaaaagagataaaaattataatattaactacaaaaatatgcaaaacaggccagacatgttggctcatgcctgtaatcccagcactttaggagaccaaggcaggcagatcacgaggtcaggagatagagaccatcctggctaacatggtgaaaccccgtctctactaaaaatacaaaaaaaaaattagtcgggtgtggtggcaggtgcctgtagtcccagctactcgggaggctgaagcaggagaatggtgtgaacccggaggcagagcttgcagtgagcggaaatcgtgccactgcactccagcctcggcaacagagcgagactccatctcaaaaaaaaaaaaaaaatgcaaaacataggtcactttcttatttccctctcaacttgcaacttttgaaacctactctaggtgacacatatttaatgccacagagtttccatctccatgaattaaactcactgctgggttctgcagtaaatgatatttcgacaatactaatacattaaatgtgaattacaggtactcaattttaaaaatccacttatagacaaagcactaatgactttccagttcagaaagaaatatagaagccttagtctgtggcaatgtaaaatcaatgatacagtgaatgcagggcgggagtaaattcagaagatgagttagagagaaaatgtaacatggctaaagaattcatattacatacagcaagttaagagggactacctaaaattggtagatcaagaaatattgatttgttattgtaaagcccaggtgataaccaagaagaggtgaactgaaaacttaaaggcagaagattattgcaattattgcaagggtattgaaatttcatttttcatgataggaaatctgcagacactttctaaagatgaccagttaggaaacagaagtctaagaaattatttagaggtcaatagaaatagttaaatttggtgattcctgggctgtgggattaggagtgggagaaaacagactacaaattttaattttacactatccagatggaatttttataatcatgtctgactactgggggccagaaaatctaggcatatttatgaatagaacccacaagcaaaaagcactagaagtgctggttcctgaaagggcctgagaaagcaagaaggtggaagatgtcaatggaattgggaaataaaattgtgggtaagggaaagagagagtttgttttgacctcacataagtcattcaaccaccatattccattttttcttccataaaataaagataataccaatttcatagggttattataaagattaaagaatatgcctatttcatagcaggtgattaataatattggttgatcatatagtaggtgatcaataaatattgattctccctttcattgaaaacttaggtcccgtggttcctatagttctgtcctcttaatttactcactctctgccagcccagtctctgttctagccagccctggtcattcattaagcagggatcttgaatggagagcagagggttaatgacttctgttccatgctaatgagtgaatacttcctctaattctaactccttgtggtgtgtccaaccctcatagtctgctagactccaggtgtcagatggtcccagcttgctctgctggcaaagtaaaaccctatacctgacagataccaagaaaaccaagatttcagaatggagtgactgagatggagacactcaaaaaagaaaagatttttatttaggtgcccactgtccttgcattctcaaccctcacatcagaggagaccaagacaccatctgggtgatttcactctctgcttttcttgctctttcttatcctcaagggcaattgaagagtggctttaccagcctgtaaatcagtagcagctataaaacatgtctgtctgtagcgatgacttttctcttgtgggatactttacagccatggaacatgcccaacatattaatgacagaaattcattactctaaatgcacattctgatggagatgttgtagaattgttggaagaggtgtatgtggaaccagagtctagtgtggcaaacaccagctgtttccaactaacttggagtactaaactgattggtagatccaccccactctcagatctttaatgaatgagtttcagtgaagcaacctcccataatcccagtgtcccaagagagcttggggagcagggaggtttggaaggacagagatggactgaacaccccaggtcaagccactcgaatcattttacagtaggaacatgccaattcactcaaaccctgtgccgttttcatgttttatgaatcttctgctttctattattaaaacattttaacaataatgagaggattttaaaatttaaaaatgggccattcacaatctcattttttaaaacatatttctcttcctagctctagttaatttatggaaataacttcacaatatcataatcatgtcatagactgcattttgttcttcatacatttacagtggcttaaaatatccaggatccctattcaaaattgtaactgaaagcacagacaaaagtaactgcatttcttggagcatgagccaggacagcacaggaaaaggtatgcattgcaaaatgcaatctgtggcccttgttttttatatactccctagtaattgacttatataaaacattatatctataaatatccagtactcagttgaccctgctgcctgaacaatgagaaaattctccctctgctcctcacctcaagtttcagtgagaaccagtatgtaagtcttgcttatatgggcatatggatgtgatagttcatagcaggagagcttaagtgtgcatgaatgaagactaaagcagaaatggctttgtgcaaatatcaccagaggcaaactagactgcaagattgcactgaaagatgcatgtacacccaccataaacattaatttttactacaagaaacaaacacccgaaatgaaggtgtatatgtgggtccttagcacgagtgaaccacgaaaatcagctctctggaacactatgaattaatctagccttttattaaaatcatcattctctggaatcctcttattcatataaaaaaagtgtgatcccctaaagctagggctaaacgtgactcactttgagtaaatcgagcctgttagaaattgatttgcctcacgtttacctacgtaagaaacctgcatatcctactcgtgtaccctgaaacttaaaattaaaaaaaaaagaaatgaaaaaaaattgatttgcctaatggtagggctgaatcaggtgactattagtcagggtagatgtttgtgccatagaaacaaataatctcaaatttcagagatttatacgaaaggaagaataaaaaaggttagtctctttcaggctacatgccctttatgagtgggctaggaactctgctccacgtcatcacctacactgggccccagctgatggagcaactgccacagggaactttggcggtggccctggaggctgaagaagagggcacttggtaaagcgcgcactggctcctcacatttctgcatggaggtagcccacatcacgtccgttcatacctctctggtcaaaccaagaaccatggccacacctaaggatgtgcaataaccctcccaaatgtctggagaaaagagagaatccaatatttccaacagacctagtgactttcacagggccattccaagttcaagaccacctaaaagaaaatcctatggaaggaaagaatgagtggtttatgcatgataaagagaggaaatggaggggtgatatgacagattgcttagattgaattatcctatccagtccatggtgttgcttccattattatccctgcccctcatcttctggttgttgggccctcctaggtcatagcctaagaagtggatgggttcttggaagcagatatgccagtcaccagccacagcagctcctgtagacatgctccgcagcccagtatgagtgaagacttgggcccaaatctgggaattgacaaaacgaggcaaagggttaacactagtcacaaagcttacaacaggatttctttatcctcttaaattagttaacaattagaaaactgcatacctcctagtcagttaattaactgagtgctttttatggctagagatagctgtaagctttaatttttgctttaaggaagctctaaaataattgaggaattaagtcatgtgaaagtgcaggtaaatgaggactatgcatttacttcatacatttaagagaatttagggcttagagttcaattctcaaaccaactagtttcggctgacttctattctactattcttgactgcccctccccaaacatgcagactttccttgtttgctttgtaagttaagtggtatttgcacatggacattaaatggacctcacttgaattaattggttttgtcaacttatagaagtcaaccctggcatatgggacactcacattcaggcccatgatcagcactggcatggaccaagatgctcctagtctgtgactggaagaaactcaaaagccaagtgatatatatttttttttcactgacttgtctgaatcacccagttgttttggtctcatctgtgacagttttatatggaaaagcatccctgtgtaaatcttacagcacccgtacccaatctatgagctcagcatattggctgaaagaagaactgattttgcagtttaacaaaattaaaatgatcaagtgacttatttgaaaggtaactccaaattccagattcaattcgttgtaggtttagacacagttttctcttcacagtcaaagataagtggaaggcaaagatgatggtatggtttatttactttgaattattcaaaaaattcattctactttctgcttggccttagctgaagtgattgtgtcaagcatctcccaggatgaaccaaaagttctaccaatgtcactggcctgcagcctgacaaaatattataataccattccaggcagagtcatgcaaaacctgggcagacaaaatgaacagtgtgtgggattagcttaagagaatgatttcctgcacagaataccattacccagaattttcaggcctttgcaaatagcacttatggtcactgtgagcctattagaatgctttttaagcatgatgctgaactaaacaccagtcattgctgcaaatctcagagatgagctgattgcattgctacgcaaattacaggctttggaaaactatttgctaagaatccttctaacatacactgttagttgaatagaacttcaggagctttaatctaattatgactaaagcaaattcctaagtgaaatgagggtgtgagagaggagaatttgtttttgtttgaacaaggaaaagagctatgaaagctttattgacctagtaaataaaggagagtgaataaaggagtcagtgataggacacttccagctagagaacaaaggggggtcattatgctgcttagttgtctctttgaggaaggattacttcagaaggaagagaaagaccaacaattattcttatttaatgaattaggcagtacttgaatataaataaatgatacttttacgaacagcattaatttcatcatgctaaaaagtcaaataaatccaaatggatgaaatcgtttataaatgatttcaagatcaagcacatattctcaaacaattggaaaaaatattacatttggcattattttaggtttgcacacattgaagtatgcgatttaacaccatcctgtaactcgaattaccacttgagaacgctgacttggaaatgaggaaaagtcaaaacaaagcacatgaacttaaaaagtttcaggctctgacagggtagatcacagggttttggatcagaaaaccactggtatttttcctaactagtcctcactaacttgtccacagaggtgtcagttactccctacatttgaatgttcttttgaagtatgaatacccacattagcccctgctcactctcaccttgcagaaagcttagtaaatgtctttgattcattaaaagagaaagtgagaatgagaaacacatccttcccaaaattttggaagttacacaaggaaggtggcatctgagccttaaagaggcagaggtgtctgtcattgttgggttgaaagccagtcattccccagcattggtttgaagcaaatggtctcagctcagactgtctgtggtaactcctattggagaaataagttggacaggatgaatgacaaggtgattatacctgacagcgcacggcatgggatggcatggaagacaagaggtattctccctagtactactccaggcactcaggcctccctgagatcaggcccccagccactgcccccaaccagggtgtagaaactcctggcctgggcacctcaggtccaccaggaagtcccaaggaaatccaggagcaaagtcccgttagtgtccattctccatttgctcatcgcattgcatatgtgggagccatggaagaaaaaacatggtgcttctcttggttgagtcttcatttgggcttcaagaccagtctacaccttggctgatggactccgggacctcaggcccctcacatttcctctgcaagcctctttacttctgatttatcaggagactcactcatttccagaggtaaccacacctccacgtgtggctagctccatcctcccataacttttatctgttgttctaagtgatttgttccttatcagtggccctgtagtcttgatggaagaagagtgccaccttttcctgcactctgtagctctctgaattcatttgaaaatcaacctttcttttagctgtacccccaagccctatttctgagtgtatttgcagaaaaaaggtaaccaacacaacgacaacaacaaaaacaaaaggaccaatcaggtagcaaatttccacatgaatttgggtttattactggacttttaacctagtccatgcaccagtactgcattattttaattagaggagttgtggtatttgattgtctgttagggttaattccatctccctcacttgttattcttattcattgttttcacagctattgctgcatgaatgtttttactaagaaaccttaagtcaacttgtctagcttcaaaaaaagcttgttggtattcttattgggatcacatgactttctatttaaatccatcccaacatgttcagtgtctctcttctcccctgacaacaatggggtttgtattagtgttctatggctgctgtaaaaaattaccacaacctgtgggtgggtgggtggtggtgcttggaacaataggaatgtattcactcatggttctggagtttagaagtctccaatcaaggtgccagcaaaatcatcttccctctgaagactccagggaagaatcttccattgtttccttttagattctgatggttgcggaatatgattcttgacattccttggcttgtggctgcatcattccaattttttgcctccatggtcacatggcactctccctaggagtatagctgtctgcattttcatatgcctttcttatgagaacaccagtcattgggtttagagactaggctaatccagtatgacttcatcttaactaagtacagctacatagactctatttccatataaggtcacactcccagattctgggtgaacataaattttgggggacactatgcaacccagtacagggctgttattataagtaagagaatgtgtgtggagatgtagctagagccaggcctacaggtcccacaaatgataactattactttgggaaaaaaacaccttacagttttgctccaacttgtagccatcaacctattgctctggttcctttctttcttttcttttctttctttttttttttttttttttttgagatacggtcttgctctgtcgctcaggctggagtgcagtggcatgatatcggctcactgcaacctctgcctcccaggttcaagcaattctcctgcctcagcctcctgagtagctgggactacagtggcgcgccaccacgcctggctaatttctgcatttttagtagagacgaggtttcaccatgttggccaggctggtctcggactcctgacctcaggttatccacctgccttggcctcccagaatactaggattacaagtgtgagccaccacgaccagctctggttcctttcatagtcaatgtctgcagcaaacaacatgctctctcaacttctatttccctcagtcatgcccttttaactctcttccttctagctaatagctgtctctacagttctgcatctgtttacttgaaagtccctaaagtttgcctccttttactcagttgaaatctccagggtaaatgtctagtgtgcctcttgcatcatttgcacattaaaaaaaaatctgcactgggagaccattggtatctttagtttctcttacagtcttcatccaagaacgtgtgattctttgtctgaagtgtattttccagagctcctttagaccattttactttttaataactatacaaaaccacagactggtggcccatgggccaaatcagagtagcacagctttaaaaaataacaatgatttggctatcgttaggtaatacatacatgctctagttcacccagccttcaccacctcccgttgctttgtacccactgtgtatcccgattcacacatgtgcatacccaatctggagacatttgagcttgcaacctcattctattttaattttcaaattattttttttttcaagactacatctcactatattgcccaggctggccataaactcctgggctcaggcagtccttctgtttcagccttccaagtggctgggactacaggccaggcatgggccaccacactcggcttgcaacctcattttagaggctcagacttgttaaaagacaaacttccgccaaattaaatgtaaaggagtttaattgagcaatgaacaattcacaaaatcgggcatcccccggaatcacaacagattcagagagactcccggggtgcctcgtggtcagaacaaatttatagacaaaaaagtaaagcgatgtgaccacgtgcggtggctcacacctgtaatcccagcactttgggaggcaaaggcgggtggattacctgagatcaggaattcgaaaccaccctggccaacatggcgaaacctgtctctactaaatatacaaaaattagccaggtgcttgttggctggcgcctgtaatcccagctcctccagaggctgaggcacgagaatagcttgaacccgggaggcagaggttgcagtgagccgagatcgtgacactgcactccagcctgggcaacagagcaagaatctgtctcaaaaaaaaagtaaagtgaggtacaagaatcggaggtgagttacagaacagagaacagctggattggttacaggtctgtgtttgccttaattgaacacggtttgaacactcagcagtctatgagtggttgaagtacagccgctgagattggccaagactcagctgttgttacagacacatactccaaagttaggttttcaatcttgtctacctcttaagttaggttgcatttcatccacaaggactcaaatatagaagaacagagtccttctcaggccatatttagtttgaattaacggactgaattttgcccgtctttgtctaggagctgtccttggtgtcctcagagcccaaagctttcttgcctatgactctataatttttagacgtgtcagttagtatcatttgctttcttcggtggtagatatttttttctcgttgatttaaaatgactcattttatctattaaagctattaagctgttgttcatgtggtaaaattttgccccttgttcaacatttgccactcaattacttctaaactgcaaaagttatgtagtttcatttaattgtcaattttcttttatggctgttgctttttgtaccatgatagtaaagtgtagacttaagaaaaaatgaacacattaaaattgggactgaaaatccattctatttacagattgattttaagcaaattataagaacacagcatattcattagtctatgtactttttaatttttggtagtctctatatatatacattggagtacttattataatagagtactttatgtatattgtatttttaaaatcacctttcattactataaaagtagatatgcatattttagaaaattataaagtacacagaacaaacataagaatacaaaaacacatctcactactcacaggatacctctttaacactaatttataccttgtgagatcttttataatgttgcagtgaaatgagtttatattgaacatactgctttgtaactttgctgttaatattattcatcttttcaataatttttttttggtatataaactatttattaacaaacaaggcctacagacttatttcttcttggacacacctacggtgcggccacagcggccagtggtcttggtgtgctggcctcggacacgaaggccccagaagtgactcagccctctatgggcccgaatattcttcagtcgctccaggtcttcacggagctcgttgtccagaccgttggccaggacctggttatattttccatcctttacatccttctgtctgttcaaaaaccagtcggggatcttgtactggcgtggattctgcataatggtgaccacacgttccacctcatcctcaatgagctctcccgccctcttggtgaggtcaatgtctgctttcctcaataccacatgagcatatcttcggcccacacccttaatggcagtgatggcaaaggctattttccaccgcccatcgatgttggtgttgagtactcgcaaaatatgctggaacttttcagggatcactagagacatggcagcagcacaagcggcggcgtgtaggcctcctgtggaagaatcttttcaataattttttaatctcatctaatggttagacaatattcaaaatctcctaattgtccccagaagtctttttagctgtgctttggggtttttttttttttgttctccccccaccccatattatatgcaacccaggactatgcattgtgtctgcttgttgtattccttatgtctctttgaaatagcactagttaagtttaggagatcaggccaatgatcctccagagtgtttttccttctgtcatttgtcactttctcattgtatcacttaacttgtttctatagctcatatatatccagtaaactagagttaggtctaaagcttgatgtattcgagtcaaatatcttgacatgtaatatgataattcacagaagtgatgtggtcttcatgtttatttacatcagaagacacatgttttctggttgtcccaccattcgtcccaccaaccactggacttggggacttgagtaatgcaatgcaagtgtgatccccatgcacattttcccccttgtgactgtgttgtgttgtacgctatccaaaaatccagttccccaccaatgattgtctcaacactggttcataattctttctcaatctggaatttcattaggctttacagaagtgtgtcctttaatgctatcagtcctcccacatttaataagcacacatccttctatagagtttacacacattcatcagggttattcagttatcctgacatagatttctattgtaaaggcaaaatatatgctttgtttctcccattagcaatcatcaaaccaaggagctggtgtgatacgaattcattttatttcaattcactacaacattattttttgatgttatttattaattaataccttttgatttatgtagacaatgtactaggtgctgcgaatacagaggactctacttatgaaaaagatatgcttcaaaagactattgttaaacccatttgcttggaagtccaaagtgtgattataaacactattgtcaacactagtaggtagagttgttgagagtttgttcttttagtctccgtgacatgaaagcttgtgttcgaaattcttaaaagaggtacttgcttacaaaaataaataaaatatcactttgggaggccgaggcgggcggatcactttaggtcaggagttcaagaccagcctggctaacatggtgaaaccctgtctctactaaaaatacaaaaattagccaggcatgatggtgcgtgcttgtaatcttagctactctcaaggccgaggcaggagaatcacttgaacccaggaggcagaggttgcagtgagctaagattgcaccactgcactccaacctgggtgacagagccagactctatctcaaaaaataaaataaataaataaacttgctttaataaaatcacagtctgtcggtggaaagtgaataaataaaattacatcacaacattacctctccaggaaagagcctgagggatgatatggaactcaatgtatctaacatttagctgcaaaatttatcaatacctgaccaatgttgttttatctgtacccctattcaattttccatagcccctgcataatttgaagacattaatcattattttatatattgatgtttcaatacttatctctaaaagatagtgacttttaaaaacataatcataatatcactatcaagctaaaaatgcataataaatccttcatttatcaaataccttatagtgttcctatttcttcagttgtcttatataaattgttaaagttaaattcactggagtcttagtccaaataagattaaaacattccatttggttgatatgtgttcccaagttcaacaactctttttctaaatctttctttctttttgaaaacttctattgaaagcacaaggttatttgtcccataaaatttcccctagtctggatttgatgatctcatctacattgaatttcccatcatgtcacttaacacaagcctggtatttttctgaaaatgagaagttagatccaaagggatgaatctaacctgaatccaaatatacatattatatgtgtgtgtatgtatatatacatatatatatatacacatatatatatatatatatatggttagcaagaacacttcgtaagtaatgtcatttacttccatcaggagacacataaaatctggttgtctctcttttgacaaaaatatgagccttgatgattatcacttagatccattaattcatgagtagttacaaaccagtgatacttgaattgtatcattccttcttcatccattagctggaatatttcttaaaagatcactgtttcctcatcgcttacttaattacccagtgctacaaatcatatagaaaaggcaagaaaaatcctggattgttttcttttagttgaaaacgttcaaaataattgggtatattcgtagaatatccacaaggtgaccaatttcttcaatatcattatgagctcaacagtttaaatatatttgacatgcttcaaatccattaatgttattatttttttgatgaacaaattgtcccatctctgtccagagggagcctcttcaagttggttcctgaatccttttgacatgatgttcaactgagggcaaatctacctccaaagtctgaggaagctgaaaggctgaagaaagagactgacaaattcagtttctcagaaagaaccgttaataggggcttaatgaacaggagccatatctttgtcttgggctgcggcaagacaagatggtggatcccttcacaccatcagtctccagagccagggcttatataccacaggaaatgggtgattcagaagggatatgtgggacatttgaagtatggtaacatcaaggtagtttgacctaagggaaggatttgcaataaatacagcggtcacccaaggaacactagataaactgaaaatcttagagaggttccgggaactggggtaaatcagaagccaatatggcagattcacatccaagatggagttgctttagcctccacacgtgactgcaattaaactttgttagttttcttactttctgcatttacaagatccaaccttgtacatttccttccttagacctagaatcagccatttttccaaggagccctggttctttctagtgacaaatgttatttagaaattataatgtgggctttatggacccatgggctattgaatttttaattgtttctgatgttttggatggaaactgatgtacatttactttaaaagcagccgtcccaaataactatttgtttcatcagattctcttgaaatattgaagtagataacatagtctacacattaaagttagcttagctttctctcttaaaatatttgttccacttttttattttttatattttagtattttgaaatgagctctcaggacaatgataaacagcagtagtgatagctgttattctactcttctttctactattagtggaaatatattagctagctatatattaccattaaggatgatatttgcattattttaaaattagtatcttttatattatagttaatttaccaaggcttttaaaaaataaataatttaaaaaataaagttggatacttaattgtacgaaagccatatttttaattattttttaattttattttataattgaaaacttggaaatagatattgaggaaggaatgatcattcttataatttttcaccttaattatgtcaatgcatcttgttagaaaaaagtgttctgttacttcataatttgaccttcctttgtgtgtgtgcctgtaaatcactgctcataaatactactgattgagcaaaacctaatctctgcatgttaaataatattataattcttcttgaagtaacttatttgaatttttacttaaaattttaaaaacgatttcaacttttcttttagattcaggaaacaaacatgtgcaggtttgttatataggtatattgtgggatgctgaggtttggggtacgactgatcttgtcactcagatagtgaacatagtacctaatagtttttcaactcttccttccctaccttccgtctagagtagtcctcagtgtctattgttgccatctttatgtccatgagtatccaatgtttcgctcctactaatctcagaacatgcaggatttggttttctgttcctgtgttaattcacttaggataatgaaaagccatttttaatacttaagattttaagtgtttctcctttgacctaatgacaacatgagaaatataaatggattttcgaatattgatccatcatagcatacctgtggtgaatttacttggccgtaatgtatcagaattgtatcattattcttttaataaagtactagtttttatttgctcatattttattcataactttccagtaatatgcatattcatatagagtctattatttttcttctgttagtacgtcctttgtccatctattctcgtgagccagggcagtttaaatggtatgggaattctctttttttttcactttggaggctaataatactctcccaaaaaaacatctgggcctgatgcttttttaattgctgattatctgcaagatttgctaaattctttcactactagtggtggactccagttttcaatatcttttagttaatttctgttatttatatatttcagacatattcttcttcttttttttttttttttttttttgagatagagtttcactcttgtttcccaggctggagcacagtggtgtaatcttggctcactgcaacctctgcctcccaggttcaagcgattctcttgcctcaacctcccaagtagctgggattacaggcatgtgccaccacacacggctaattttgtatttttagtagagatgaggatttcaccatgttggccaggctggtctcaaacacctgacctcaagtgatgcacccacctcagcctcccaaagtgttgggattacaggcatgagccactgtgcccggcccagatatattctttctgctgcttgacagtatgctgtattaaaagatttttgcctgttaatttttatgttttagaatttttttgagattttctctgtaatgtaatatattaattattttcatgattgtttggtgaagtgggggaaagaattgtatcctcttgagcataaaatctgttatagaaacattactggtaaaataactttgttaacttatattactcaaattatgtatattattacatatttttagcttaatgatctagtcgaatgatttagtgtaataacatagctgttttgtcagtatatcttggaatacctaataatcatttttatttatatatatttccgttctgggtcacttaacctatataggctcataactatgatacctttattgtggattattcatttcttcctgatttttaaactcaattttgccacaaattttgttattttcgatgttattcggtcaactgagttttcttttctatttttttctccttctttcttcccccctcttttccatactctttttcttccttcttttcttcttcttcttccctctctgtcttacaaagtttacatatgcaatcattctcatttcctgttcttctaattttctgtttttaaccctataattttgaaagtaagatttgctgaatttttttcatctcatataaaagtcttttatttcaatatgagtgtttaagtcattgttacgtagtgctataaatgccgtaattttcttgttattttatttcgtgctttcagttttttatgtttctctttctatgttacttctttcctatgtactttttttcctagtgtaattgcttttcaaagaaaaattttgcaaattaattatttgaagagatgttaatggatgctctggcaaaaaaaatcacaacactttctatgactacacaagacagggaaatatttgggcattgttttggggatccacaatgattattaaaatggttgtgtttctaagagtatcagcagctaggcaatctctttgactatgtttaatcagagttcacaatcttatttgaacacagaacacatttttcattatacctccagcaatattctacaaaatcgtagttgtgggatactggtttgggaaatgctcttctagtgattaggaattcatagaacctactttattgtataattgttcaccttgaactgttctaataatactcattgaacctatttttccaaccccacttttgagctgatctcctgttttttgtgtcccttcgactaaactcttcaactagtaactcggatttactgctgttcatgacctggtatcatggtgtaattctattaccgttatagtttttgccagctgagacattttattagcaaatgattaaattgagctattggaagagaaatttatagtgacaactatagcttggcctcaggtagatactcaaattgctatgagtaggaaaggaacatctaatggatggtaaaagagaaacagatgatctcaagtccacatgaagatgggcttgagattatcacacaagacaggagattggctttaaaaggagcagtatcatcacattaaactagcattcttccaaggcactcaaagaacttcaaaagctccatgaccaaattattttatgagaaccccaagtgaacacatttggctttgaaacaaccatcagtgatttgatggtttactaattttcaaagaaattacaatacaatacaatacaatacaatacaatacaatacaatacaatacaatacaatacaatacaatacaatacaatttgcaggatagtctgtgagatgaaactggttaaggattaagaagaacagggttctagtgacaactctttggataagctgttttgtttctctcaacttcagtcactgcagctgcagaatgaaagcagagaagtaactgaagtaattcaatgattcttacttcttacaacctcagaaagtctacaaatcgatgaatataagttttggagtgttactattacaaacagtgtcttaataaacacccttaaacatgtctccatgtgtgttttagtgtttctcttggaaagtgttgattgcgcctctttagaaaattgtgaaataaatgtagtcaccaccaacatattttaagaaagatgattgagcaatacaaaaaatacaactgtattacatagagttaaggataatgaatgtttcatgaaattaagttttgttttatttataagggcatatgtacatatatatgtactgagttgttttttaagaggtattttctactgtgagttatttaaagacagtttgaaatacactctactgacagtaattatctaagatgaacttgatgagtcatatgctttcttcatatttaacttcattaggtatggcaaaatttcctccatagttggcagtatcaacttacactctcatcatctgaatttgagagcctggatcttctctaaaattcggatggatcatctttttccatgctaaagggcgtaaaacactacaccatttccattttcatttccctgattgctagtgaaggtgagtaacttctcaccactctgctggtcattgagtctcctattcattgatttgtttatagtttttgccaacttttgcaattttttgttcatttctgattgacttataggagtttaaaaatatattccagatactccatgagttatatccactgctaatctttttcaagtctgttgtattaagatatacaaggttttatgatggcttgcagttcagaaactttaaaatttaatgtgaacaaatttgtcaatcttttctttataagcacaacttataagttgtgctttttgagtcatgtttaagaaattcttccccattccaagttcataaaaacatacttctatacattattctaaaagttttaaagttttgcttttcagatttatctttattctacctggagaggatgttttgtgtgttgtgtgaggcagggatatgcttttttcaaaatgaataaccaattttctcaatgccatttattgaataatttattatttatgcaattataaagtgacttttctcatacaccatgttcccaggtaaaggtaggtctgtttgtcatacaaagcctggtgccttacatatttgaccatacttattgttagactttttctaactccttgaaatagtttagagaaaataattttgcagagaactgtggccttgtactaatatttgagggtttaaattagcaagaaacaggaaatgtaggttacatgtattaaataaacagtaaaagataatagtgccttttatacagaaggtattttgttatgaattagtaataaagatgtaaatatgatggttaaccttgaaaaataagaaagatcttcaagtaaatgatggtctggtatagtatttctcaaccttatcagacctaacacctttttgacaactttttgtaatcaccccataacgatcctgaattttattttatttacaagctaatgtaacccacctgctcacataccataaaatcaataaaactttttgtaacataaatgaaaaaaagatgcataagtaaacaatctgtatttcaatatgtatttcataactttactaaaatagtcaaatacttatcctatatgtagaatcacctcaaatgtgacagctactgttgtaggctcatcttattttatttttccttaacccaatcaccacaggaagtattgctgctgaaattgtgaataattaactatgttttaaacaaaacaaaactcaatttcctcttgatttatatagtggttgctttcctagaaaattcaatatatataaatgtgtttaaaaagtacttaatgtacaatgcgaagttacagtctaggctcagaagagtatcaattgggtttttaaatggataaatatccagctgagcattccaagccaaatgagatgaggagctagtctttttttgttggcttgtcccttgcattgcagtatgtccagcctccctggttctcacccactatatgccagcagcacctttgaatcactacaaccaccaaaaaaggcctcctctccaccagcaaattcctgaaatggcacctcagaagatgggactatccgtattgaatgacactggtctagaagtaggagattctaaatctaatcaggtaagggcaaacaaacatccaaagtgccgaataaatgcatacgcagggtgcatggggtacaagagagaagtgactggcacccccaggatggggtgagatgtggctggccatggtagtgctgacagacgacaggaattaagacaggaatgataaatagatgttactcaactggctgagtctaaagagttgggtgaaatgcatttctcaaagaaagcctctccttctttggtgttggaaagtgactgtgatgcaagtcacaaacaatgaagaaaattatatacacagaaatgtcaccaaaaccagactcaacacatccctttcccttctagaattcagaaaatctttgtcttaagtaggttacagatgcggacagaaaagattcacaacttcgttaagcttgaggaaacaatctttttttcttctgtgaaactcatacaccaagatactcctaagtttccttcatctgaggcacttgcctagctccattaccttcaaaactaactagtagctttacctcaactatcttttaggaatctgctttggaaacacatctgtcctttgaaatgatatctacaaaaggaaagagaaaaaatacatttaaatttttgaaggagtctactccctatatgactctttaaagatcatttttcccctgatacatttattgtagcatcaataggaaagtgaaggaagataagcatatggaagactagctgaattatcatgtagaatattctctgtatagatttattagtataactaggaatttcacagctggaataaagtgtagcaagtaatacactttattctcctctatagagataacagtaaactaaaatgatcccagatgaaatatgttttacttggaaaaattttatcactaaacaaggcaattcttgccagtatctaactgctcaaacataatgtttctgatgataactccatttacaatttttttctgccattgcttcatatcaattctggattccattcaacccagggccatgaataagaacagcatgtcttcaaggctggccctgtgcctagtataatgaatttttgctgaagtataggatgaatgaataaattattgaatccaccaaatggcaaggatgtgtacattctgttagtttattgggctgttgttatttcagcacaccattttgtccagactccaaacttcaccatctaaatccacaaggaaaaccaattgagaccttaaagcaagaagctctcaagctaagaggaacttggaagtgagcctaaaatacaactgatggattctggttttctgttttcaattgatcacaacactcacactcaacattttcatccctgtttttctccagcacatccattatctttacctatctgagaggactcccataatgataaaatcaactaaagtagttcaaactatttctaaaactgtaaagtacagctattctagtgtttagtgtgtgacatgcacaagattatatgtttacaatatgaacatgaataggacttaatttccatcctaaaagagctggcaatctagtgaaaataccaccatataaaaatttactgtaattgtaggacagaaataaggcttattaagagactcttgtaaaggtactggcttactaagttttgtgttactataacagaataccttagactggtcagtttataaagaacagaaatttatttctcacagttctgtaggctgggaattccaagatcaaggtgctggtgtctgatgagggacttcttgctgtgttctcacatggtagacgggcaagagagataaactccctctgtgaagcctttgtataagagcactaaccccctccatgaaggaggaccccttaatctaatcacccctcaaaggtcccaccccttaatgctgtcacattggaaacacctgaattttggagggcacattcaaactgcagcagactgtagtctacccactcccacgacgtaatgtatcataatacgtggggacatagtacaagatgctcaaagaatttgatgatatttgctagtggaaataaatgatgcagagaattacccatagttttactgcattttaatatacaatgaactctgaagaatatactctaggctcaaaaatcaagttctattctcctcacaaaggaattagtggaacccatcacaagctaactaagccaatggcttgtgttgatctggtttgattttgtcctccttgtctttccccttcttgtctggattgtgctagaatgtgacttcttgctagtgggccctagctttaatccctgcttactgatttactaaaaatacagggtctttaccaattaatttatttcaaagtctttgtttcacttcaataccttcagcaaatattacctaggacttttcacttctgcataatcggaatactgccagcttgtatttgggacctttttgaataactccgttttgataaatatgcttttaaataattctttgttgatgggatgggtatttaactgaacgcaaatagagaaagtgctagctcagagagtgtggtttccagtgtcaagagaaagaaaatgccataaagatgttgagaattctgtctgaaaattgtttatttcttatactaaatatcttttggaaataatcatttcccctctcctacctccataatctacagttatttcgcccacaaatgtatagaccgatgttctcctctgatagagacagagactgaggtggctactgttggggcttggggctggaaggttttgtagattaggggttgaggctgctgtttgtggggccatgatcctagctgcatacacatagatgactgagaagtggatctagtgtgcaaagggaaaagaatggcattagatgcaagtgaaaaacatggaagttgcctgaggagttccctttctagtcccatattttctgtggttgtttgctgtgagattttccttattccttatgctgtaagattatgacttacacatacaaacgacttgtgcagaataaaagtgactttaatttttttgctgaataactcacatggtcttcccaacagcccgcactccactgagtatttcttcaaagtttgaatactatcttcttacaacagcctgtgtcctattttgtcttcttttgtttttaggttttaaggtaaccgctctgttttttcagggccctgtgtcccctcccactttttctcccagagatggcattctgagtatatgaagaaaattactgcatcctgacagcagatgaacattattgcatcctcactgcaaggttggtggcttcagctgtgcagaggtgagtttcagatacgtcttatcagttgtggtgccatctggtcctcgtgacctctgtagtaatggtgtcccttgtatgcctgtggcttctgatgtttgcagctggtaaaattgtggtctatttggtatcatttccaaccccatctgaggtttattttgcagacggataagcgaagaattacattttctaaaaccctctttcccataatggtccctggttccactaattcctttgtgaggagaatagaacttgatttttgagcctagagtctgttaatgagagacactcatggagatttggaaggtggatgaggacagccattactttcctgaggcagttacagccagatatgtgggcagatgtaagatacacaatgccctcttggtatgctcttgaaatccgctacattgatgtttcaggctaaagtcactggagatggtcttagtcagcctgagctgctgtatgggtggtttaaacaatagatatttatttctcacagttctagaggctgggaagtctaagattaaggtgatggcagatttagttcctgagatttctggtgagcagcctcttcctagcttgcaaatgaccaccttctccctgtgtcttcacatgccaaagggtgccctctgatgtctctttcatttttcataagggtactaccgattgtggggtcccaccctcacaacctcatctaaacctaaccacctcccaaaggtcccacctccaaataccatcacactggggattagggcttcaatgtatgaatttgttggggagaaatcaacatccagtccgtaacagaggtgtgttctcttccctccgcactcccaggtattccaaagactaagacccaacatctttatctaaagacttccaatactcaaaaatacataaagtggcttctgttttcttgacctaaggctgactaattaatacaggtagtctcttccgagagatccaatgggaaactgggtaaagactattctgtttttggttttatttcccttcctacatatctcctccctctacctggcgttttgctcaggaggatgaagccgggtcatacattttgccatttctctattttatgtccttcctccttccctcactatatgattgaaaagagtatgcttctataatatttactacacataatgctatgtaatcatagtatattgccttgctcaatattagaaggcacataaatagtcaacagaatagtcaagagatctaactacaaataactacactgggaaggtgggagaagaggtgagaaataaaggagagtgaaattctcagctatcatgacagagagtaatgtttaaattgacagatcaataaagggtaatatgaacatgctatttagaaatgtaggatttactaccaggatcgactaagagagtttaaagtgattgactttggggatgaagactaagagacaaggagagattgggacagagtgtggttattttttattttaagctttttggtaaaattttacttttagtcatgtatatatattgcctcaattaaaatatatatcttttaataaaaagcaccaggcagtgcacgatggtagaaagaagaaagcatagcaacgttattggagaaatctgagtctaaatgcaggtggcgatcagcagccaatcccagggaatcagcagagaaggtgagatggcaccaatcctcccaaacacacaggtgaacgtgcacaaacaataagactaaagcaaacagtatttcctccaaggtgctcctggcagcctgcagagcttgaagagttgatttacgacctcaggaaagaaagctttcttctccttgttttgtttcctttctctcagataatctatgtagacatcatgttgtaacataaagatggactggagagggaagaggccatccatggaaagctcaggttggtgaaattgtctagacagggatggggagcatctgaaccaaggggcagtggcatcagcagggtctcagcactgattgactgtgggcaggcagagtcacaggtgctggtgaggtgggcggagggagcagggagggaagtgccattccagaggggcaagacttggtggcaacaggcaagatgttggaggtaaggattacaagtgactgcatcatgactcaataccttgaataactgcttggtagacctcagaagggaaaattggcaaatgtgtgaatttgctgaggctgccacaatgaagtaccatagacggggtggcttaaacaacagaaatttattttctcatggttctggaggctagaagttcacgatcaaggtgtcagaaatattagtttctttcttctgacacctctctacttggcttgtagatgacagtcttcctctagtgtcttcatatggtattccctctgcatatgtgcatgcgtgcatgtatgtgcttgtgtgtgtgtgtgtgtgtgtgtgtgtgtgtgtattttaatctcctccttttataaggacacccatgatattggattagagcccaccctaataacttcatattaacttaattacctcttaaaaggccccatctccacaggcagtcacattctgaagttactagggcttaggacttcaacatgtaaattttggggagaaacaattcagcccattacaagcctgatgccatgtatgatacgacatgagattttctctcctccagcttccaaacctatacacatactaatgcatctgtctttttagttcctgtctgtgttcctcagccctaattctttgaaacacacccttccaccatcccattactaggcttattttttgcacataaaatgtcttcaaagatgcaacattacaattcatactacacagttattattaattgtgcactttcagagaactttccctgaaataaaattcatttgtgatataaaaataataaaataatcctattctacatgtcttaattaaaaataaaaatatgtgcaacatcatatacaccatggaatactatgcagccataaaaaaggatgagttcatgtcctttgtagggacatggatgaagctggaaaccatcattctcagcaaactatctcaaagacaaaaaaacaaacactgcatattctcactcataggtggaaactggacaatgagaacacttggacacaggaaggggaacatcacagaccggggcctgtcgtggggtcgggggagggggagggatagcattaggagatatacctaatgtaaataaggagttaatgtgtgcagcacaccaacatggcacatgtatacgtatgtaacaaacctgcacgttgcgcacatgtaccctaaaacttaaagtataatttaaaaaaatgtgcaacatgattatctcaatagatgcagaaaaggctttcaagaaaattcaacatcccttcatgttaaaaacgctcaataaactaggtattgaaggaacatacctcaaaataataagagccatctatgacaaacccatagccaacatcatactgaataggcaaaagctggaagcatcccccttgaaaaccagcacaacacaaggattccctctctcaccacatagtactgaaagtcctggccacagcaattaggccaaagaaagaaagaaagtgcatccaaataggaagagagaaagtcaaactatccctttttgcagacaacatgatttgatgtccagaaaaccccatagtcttgacccaaaagctccttcagctgataaacaacttaagcaaagttttaggatacaaaatttactagcattcctatacagcaacaatagccaagctgagagccagatcaggaatgcaaccccattcacaattgtcacaaaaataataaaatacctaggtgtattcctaggtattcctaattagggaggtgaaaaatctgtacaatgagaattacaaaacactgctcaaagaaatcagagatgacataaacaaacggaaaaacattccatgctcatggataggaagaataaatatcattaaaatggccatattgcccaaagcaatttacagattcaatgctattcctcgtatcaaactaccaatgatattcttcacagaactagaaaaaaagtttaattcatatggagccaaaaaagaccccaaaatagccaaggcaatccgaagcaaaaagaacaaaaatggaggcatcatgttacctgacttcaacctgtactacagggctgcagtaaccaaaacgcatggtactgatacaaaaacagacacataagctaatggaacagaatggagagcccagaaataaggctacacacctacaactatctgatcttcaacaaagctgacaaaacaagtaatggggaaaggacttcctattcaataaattgtgctgggatggctgtttagccatatgcagaagattgaagatggaccccttccttgcactatatacaaaaatcaactcaagatggattgaagacttaaatccataaagtgtcaacctaaagccccaagaccataaaacccaaaactataaaaacctggaaaaccacctaggaaataccattctggacataggaactggcaaaactttcatgatgaggatgccaaaagcaattgcaacagaagcaaaaattgacaaatggaatctaattaaactacagagctctgaaactatgaagagagtaaagaatgggagaaagtatttgtgaactatgcatctaatgaaggcctaatatccagcgtctatacggaacttaaacaaatttaccagaaacaaacaaataaccccattaaaaagtgggcaaaggacgtgaacagacacttttcaaaagaacataacacatagatgtggccaagaggcatataaaaaagctcagctgggcatggtgcctcgtgcctgtaatcccagcactttgggaggccgaggtgggtggatcacttgaagtcaggagttcaagaccagtctggccaacaggatgaaactctctctctactaaaaatactaaaattagttaggcatgatggcacactcctataataccagctactcgggaagctgaggcatgagaatcacttgaatccaggaggcagatgttgcagtgagctgagattacaccactgcctgccagcccaggtgacagagcaagactctgtctcaaatttaaagaaaaaaaaaaaggaacacaaatcaaaaccacaatgagatgccatcttacacttctcagaatggctattaataaaaagtaaaaaaaaaaaaacagatgctggcgaggctgtgaagaaaagggaacatttatacactgttggttggagtataaattagttcagccattgtggaaagcggtgtgttgattcctcaaagagctaaaagcagaactgtcacttgacccagcaatcccattactgggtatatacccaaaggaatagaaatcattctgtcataaagactcattcatgtgtgtgtatgttcatttcagcactattcacaattgcaaagacatggaatcaacttaaaggcccattgatgatagaatggataaagaaaatgtggtacatctactccatggaatactatgcagccataaaaaatgagatcatgtcctttgcagaaacatgggtgaaattggaggccatcttccttagcaagctaacaaaggaccagaaaaccaaatattgcatcttctcacttataagtgggagctaaatgataagaacacatggacacaaagaagggaacaacagatgcgggggcctacttgagggtagagggtgagaggagggagaggattagacaaaatgactattgggtactggacttagtacctggatgaggaaatattctgtatgacaaacccctgtgacacaagtttacctatgtaacaaacctaagcatgtacctccaaacctaaaataaaggtgaaaaaaaatattcaatttctaaacatagaaagaataaagaatcttacacatctttatattttcagaattagtgcttgtgctcatggaatttctcatcaccaatttgggtggtcatttaagtcctaagtgttaacgggtccacctcaaaacccagtgggagataaagaccagtgacataggctttgactatatggacatcggaaggctgcctgttcagtctgtgctcttcacagaaaaacatcacagcaaatttgctttaaataatgtgctacacaagattcaagacatacctggtacattgaatgctttaagaatatttagctcatgagtatattttgagtatattttgttctatgcatttttgtatccactggaagtaaatctttaacataaagaaaacaaagtttcctaaaatgattaccatctgttttgacctatattgtttccagaagtataatgcaggcatgtgttaaagctacctcgtgatagcatgagggttagggtgagggtcacaacacttaatatgggttgtcaccaggaagctgcttctccccatcagaactgtagtgtccttctctctacggtgtgttgtcagacaacatctaggtcaaacaaagtcactctgcaacctaccttgctcctgataccctgtgaaatgtccacaaaagtcatgcataataatgatcctggaatttgtatctatttaaattagtacaaaggtgataaaaagcactatttatttatttatttatttatttttcaggaaaaaaatgcatgaaacccaatggagggaaggtgaggatatgattctgccttctaccctaggccacaatgccaaatggatcagaagagcagcatgaaaatggtactttagaaccttgaaaacaaaatctgagcaaaagccaggatcttttcagactttgcaaaaattaaattttttgttatcttttgttgatgttggttggtcaaacttttgacaggtggagagagcacatcttttttaaatgactcaatattttggatttggaagaagtaagcaccaatgagatgagttttgtcttacgatgacttggcatttactgtaattcttaggtgacattttggaatacaaacttttgagggtcttcccgggacttcagtttttcaataagatggtcctttgcttcctcccctgggcagggtcacattttatcttagaaaactctttcaggaagttaaatccatctccagggtctttgattttaagcaacataaatatatccaacctttcttaaaaggagatcaactatacggaaatgggaattgtactgcccgtgagtgcggaatatgccctccgaagtcacaggctcggaacaagagtctgagggtaaactagaaatttgcctctctcagctcctctgtccacaaagcttgagccctgtgtcctcgtggtctcctcatggatacttcaaaagttgtcactgaaaagtcattcacaagcatgattccaaagaattccatggctgcaaaaaatagtgactccctcaccagattgtcatagggacaaaaggagttggcttgtcatcccaacagtcaacacatcattgaagcaaaaccagattttaaagaagcaaatgacaagtgaaaacaagatcaagaagctctgctgaaccaataggaaattgcttctaaaggcttttcaaatcagatataacaacacttgaattttatcactgtctacctgcctggaccagctggcaggctggctacaaataggcgaaggcatgctggagaaaggaaaaagataagagtaacccacaagcttacaaaactgcgccctatctacatggtaattaaaaactgtacgttttgatggcagatttctggatgacagcattgcaaaaagtaaatgatccaaatgtgcacactttccagcagaattccagatttggaacttgatccaaaggaaataaatagagaagtgagtaaatatttagctgaaataatttacaccgcagcattctttatgagtaaaaaaattgaaagcaatttaaatgaccctcagcataggctaaacacggaatgggtaaattccatgtagccattaaaaatgatgctggagaaatatttccttcacatgaacagatgttcgcaatgtctattaagtgaaaaaaataagttataaaataacatgttcaatgtgattccattcttgtctgaaaatatatgtgcaattgtatatgcagagggaaaaataccttggaggtaagtggtcacattgtttatatctggatggtggaatacagggactttactactttcttatttgtgtttactactttttttttttttgtaatgagcttgtaaaactgtaagaaggttaaatgaaaaaggaatgcagtgaaacttcttataagtaaaagaatcctttcacaatgcaaataattataccctccctttcttcaggtgggcattggcacctgttccttccgaggttctcttgcagagggagagccagcacttttcttagcttccagtagaggttgttaccgcagtctttaaccaagaagagctaaatgttttccaagtggattttgtgtttctgaccactgctgaccaattataggatgtgggccatgtaataacctcgccaagcctcagttcctcatctagaatatgggaataattaccattctgtcttgaaggatggctgtgagaattttaatagacacaagcaaaatgtttggctctttgtagctgctccataaacagtggcagtcaccactattatcctcaattctaagataaataagccacagtccctgcccttacagaggtgacaggaaagtgagaaacacttctttcccaaattacacagcctcttttcattgattcagttattgggaacacagtttgggagtttctattttcttattttgtaaaagtttgagcttccatttgagtgtgcccagggaaaggccatcaactcattgcagcttgggctggctgcgttctgtagtggggcaagcagggccccacgtgagcggagaccccattgagctccagtggaggacaagtatttgacagctttctgttccccagccatcaatgtctgccctgcctggttgtatttcttatgaatactcctagaccctgaaaagactacattggaaaaaattctttataggtcactacttctatttttgacaggtgaactttcattgacctccatgaaaatctgcctctgtaagccaggctaatgctgcattctgcaaaaaaacaaataaaaagaattgtttcattaactgggctgaaagaggtatcaccctaattcttgacgtgctaatgattgctggttcttgaaggtgctaattttgagactccagtgtggaaaatgtgttcatttccccagaggttcagcattagcctttttttttttcttttttctttacctaatcctgatattagttcacatttggactttggcccgaataaatacattagaaatatatgcattttaaataaatgcatgtttgatatttcccctcaaactttattatcaagcgtatttgcacaaaataggatgtttgatcttaaaaatggcatcccgtctttcatgggagaatggctgtggaatgaatagcttttatcatatgtctaaaggcctttttatttcagtgggaattgggcttttacttatagtgtgtgctgatcttcattgctaatgcttccccatttgaaaaaaaaaaaatctttcattctttagttgttttaatgcaaaagagaaaaagaagatatgtaaatatggacctttaaaaaaaaatccttgggcacattgaggatgcattgagttgcactttctcagtgggaatcactggtatatcacacctctaattgttaagcacctacttttccaaaagcagccagttgcttaaagttccttttataaaaaactgtttcctaacaagggagtggaggtaggctaacagttgggggatggttaatgagactgggagcttcagagcttctcttctctgaatgcagaaggaaggatttttgacaggtaaaagtaaagaagagcaaaggtagaagggacattagggatcaagaataactatctcatgttattttggaaactaaggaggaagagctggagtcacttgttcaaggtctctgaggatagatgataatcctgcttggagcttttcctaccatttcaaactttactccccacctccacccctacccagtttggttataatcaaggggctgctggatattatactcagcttagttccatttctttcaacaattgcaaattgaatcttattatatgtaggcactctcctaggtgctggggaggggatggggagcagggatggtctagtggaaagaacccaggctgcaaagaagctagacttatcaattgacttcccagtttcactgctgaccaagtggtggatctgggccatgtaataacctcaccaagcctcagttcctcgtctagaatatgggaataattctcatgctgtcttgaaggatggtggtgaggattagaataaacataagaaaaaatgtttggctctctgtggttgctccataaactgtagctgctccttttgacttcagttctaagataaataagacatagtccctgctgttatagagttgagaacccagtgaaaaacactttgggaaatatggccctagaatgcttgcagttgcattaatcagtgactggatcaactacagtcatcttcacaacctaaactatactgtggttaggaaattccctaaatttcctatcacagatcctaggagtgagaaggaaaagaaagaggagcctggagatggggtaaattagacatgatgtactccaaatttgtctcattagcctgtaatctggttgctgggaaaactcacctataaaacatgagacttttttttctctaattcatgaacaaatctcagaatggcaggggatcattgtggatcttagcgagaaaatcctttatgcttgtgtgtacaggggtatgtcttcctgctatgcaaacaatctgttgaaaaacttaaattttattagatttccttgacgtgacatacagaacaatgtttgattttttatattgctttatctatacattggaaagaaatgactgaaaattgatttacattggtggaactggtcttgggtgaacacatattcctggcttggtgaacacatattctgtagcataaagcaaataaaaatcacttttactttttttttttttctttttttttttgagatggagtcttgctctgtcgcccaggctggagtgcagtggcgtgatctcagctcactgcaggctccacctcccgggttcatgccattctcctgcctcagcctcctgagtagctaggactacaggtgcccgccaccacgctcgactaatttttttttttgtatttttagtagagacggtgtttcaccgtgttagccaggatggtctcaatctcctgacctcgtgacccacccacctcggcctcccaaagtgctgggattacaggcgtgagccaccgcaccaggcccacttttacatttttaaatattttgccttacctatctgtttttcatttctctgtctgagtattaagaaatacctttaatggaccaatccgtgcctggattggaaagatctctacccaatcttggttctacttctagatttcaaggccatctcatcagaagcacaattattactaaagtctcctaatgagcatctgggagcaacttgatacatgctttctgcttgttcaagcaagagggagattcttgaacattgggaggcgttgagcctggtaagctatttctttgcttcctgattctacctctgtctttgtggccagataaatatactattttattcacatgtgttgagttaacatattggctgttctgcaagctacagtggattcaaaagaaaagatactgtttcttgtctcaatggcatttacaatctcgctggaaagacaagaggaacagtggcagtctacttgcaaaaaatagcatttgatatttgcattgtttatatgtcttatgtaattatctaatatacaaaattaattttaaattttttatcacaatgtttgccattgtaaattagaggcacttaaattactattaaaatgtgttaagttcacaaggtcaaatatatattataaatatataatgtattaaatatatttatatataaatgtatgatcaaataataaaactttcttgtgttttaagtactaagacttttgaggtatgactaataacaaaatagttacaaagtatgaataagtgagtatatatatacatatatttgtatgtagatatgcatattccctacctccaatcacttgaagcagccaccctccaccctctctcccaaaagcaatgagcacacctagtacccacattgattctaaatactttactaaaaggatccagggctccttggagaaataactttttttctgagatggtgtctcgctctgtcagagtgcagtggcgccatctcggctcactgcaagctccacctctcaggttcacgccattctcctgcttcagcctcctgagtagctgggactacaggtgcgcgccaccacgcccggctaatttttttgtatttttaatagagacggggtttcatcgtgttaaccaggatggtctcgatctcctgacctcatgatccacccaccttggcctcccaaagtgctgggattacaggcgtgagccaccattcctggcctggagaaataacttgatccaggggtatcgcaggaaagtacaagatgagtctgaaatatcatgccaggaagtgaagaggagtttgaagaatcagggacacatatcaaaaggggcaggagcctgcttgcaggatccccctggccaaagcagaacaagctgagcaccaaaatattggatggctgcccattgaataaaatagaaggccatgactgcatactgatatcaataaagaagtgaatggaggagaatgaatgttcattcttatagcaggatgcccactaacatatgtagaagcaatgatggatataaaaaaaaaatcaccctccagccactctcctagtagcggatgactcatagactctgaattttgacaactgtcccaaccaagtctctttatcctttctgatcctacttaggaacccacattgcacttatttgttgtatctcattatcaccttcaatctggaatagttgcttgttctctcctagctgtcatgtctctgactttcttaaggagaacaagattttcattctctaggatgaccctcaacctaggttcgccctatgtttcatgctgatgagactctggtcatggattcttggcaccgatatgcagaacagattctggcttttcacggtgtctcacatcaagagaaatataaggtccattcatcgtacctaatcatggtggtgtcttccaagtttctccaccctaaattgactattttttctctttgtatttccctagtgttttgtagggagatatttctctactcaccttcctgtctgctttgcaagttcatgcaatgttcattaccctagaggtccagtgacatcctgagcattctatggctgtgtggaaattacaacatggaaggttttagggaccacagctacaaaccttttgaacttgaacgtgtctgagagtcactttttgacgatgtttcttggaagaaaattatctcgtgttgaattcagtgggctcgtgcccatgcattactttgaagtcatctgttggccttcctggaggaggacatgatgaaatgaagcccaagctttgaggaggattttttttcgctttgctcccagtagtcttcctgtttttcacactggttagatggccttgggctactgtcactcatggcttcctggggactggctcttgtcatgagattgttttggttatcctaattcctgaccttttgaattcagttgaagttgttttctttctcaaccttgcaacaaccctcagctgtttgaggagagcttactaggaaatgtttatttttcattaactctatttctttctattagagccaacagaaaaccagaagagcaaaagagaaaggagatctgttcaattagcctcattagacttcccacttcaggtctctgtccagctctagtaaattcaccacaggagacactgggaaaaccgtgatcctgctggtcccttctgttacaagtcaatgccttgttggttcatccgctcaatgcttgttaagtcctcaggatgtgctagatgctctcacatggaatgtccttttttttttctttttataagcaacactgaaagatacgggttattaacttcatttaaacaccaggaaattgaagtttagagaagctaagtgacttgtccaagattccttgcgtggaaaatggtggaaccagttttgaatctttagacaccacatagttttctattctcagtgtctattttgaggaagtgagtgggctgtgctttgtggctatattggcctagatagcataggcagaggagaattcctcatgcccacatgcccagcctggctcactgagcttttgcctggaatctagggggtaaatcatgagctcagtagctattttttcttctctccctttttccctgtgaatatacttctcctgggggaccacatgggagagaaggaagataggaaaagggctggactgagatataactataaacattggcataatatcatataaataaaactcccatttatataaagcttctacgccacctgagaacttagagagaatgagaaaggaacatgctattattggaaggaaatgtagagattgtttagctatgtctaccttttaggtagataaggactaatttggagctggagaagagatgatattcatttaaattccatagctaatgaatgtcaaggccaggatgtgaattcagatctcttgactcctgaacattgggtggttaagagcaaaactaaatgtctataaatttgaagaaaagtatgagggagcagaataatttgggggctcaattctcagatcctgaatcatgttactgtagacataaataatagatattcaagaggctcaagattctcaggaaaaatataaaaactttaaaaattaatacataaaaatcaacctgttgacatgtaatgacaactaatgtttattgacttaggaaacaagtacattgagatatatttttatatcataaaagtcccccttttcaaatgtgcaattcaatgatttattgtgcaatcatctgcataaaccagttttagaatatttctataccccaataagatccctaatgcctgttcacaatagttagtattaatcgaatgcttacttattgactcattgttctgagtgctttatttgtagtaactttcttggcagcaatactctgagaggttttgttattatctcccccattttactaatgcagaaaatgagttgtgggaaggttagataactgcccaaggtcactcaggccctgggtgatcttagtccagttgtctgtcccagatttgaactcagaacgtctaacctcaaagtttgtgtcctttcctacttctctcttctacttccacatcaggaaagaaactgagcaactgtttgtctatttgcatgctggtttgggggagtggccttgtcccagttctctttcttattccatatttttacatgccacaaagacacggtaaccctctttaagtaatctgctgttatgaagaggtggttgacaatgtcaaattgcatcttcagaggtgtcatctttttaagcaagggataggggtgtgtgcaaaagaggaaggaggggagagtcatgctcctgttaatagtgaatgctggaggctgtactttttcatatactccatggatccagtgtaccatagaacaatgcagttgatgcaattgagaagaaggacggggccactgtccctatatgcatgccgtctagggatgagatttgggctggaagactctgagtacaatgccctggaaaggagatggaacccatgtgaggctcaggacaatctacctgtctggctggttcttatcccctctgagtatcagaggagcagacgcctgcaaatgttgtcctctgggatccagacaaaaggtattttttataaatacttgatgtctttaatagactacaagatagtctgggctctatcgaacaagaatgagaaattataatgagacaattgcctaagatgaaaagacaacaaaatgaaatttaaaggcaaatggttggaataagaaaaaaatggcaaggaaaaccaaaggttccattgtagaatcaaaatcgaagtgggatgatgtagagagccacagtgatattaaggaaaggcaaatgtgatgaaagcagtggagaaaagtattgaagacagagaacagaagccaaaactgaagaatcaaatgtatttctgaacaataaaacagcaatgatagatagaattactaattaaacatcacacacacacacatttttttctacacattttctgcaaattaagacattaccacattacattagagaaaaatatgaaataactccaacacctagaagaaccagagcaaaaatttcccttataaacacaaattctataactatccaataaaaactgggcaaattaaacccaaagtaatacaaagttagcgggttttagatttctcctgtgtaatgtcaaacagcccaaaataagagaatccaaaacaccgttgaaggaaaactattgtaacacaatagttaccactgccactttttctatgtgcaggcaataaaaagatttccagatatctgaaatatatatttcccggggtatatttcttaaaaaaaaattagttgaaaaaattcattctatgtgaaatgtagaacaaaactaagaatgtaagactagaaaattctgtgaaaacaaaaaataaagctggtggtgacaaaacagttaaaacatggaattaattcaaaaatatttcttaataatatcaaagccaacactgatttagtgcttactatcttcctgcactgtgctaagtattttacacatacctttatttagaagacttcatgcagatgtcaaaaactattcaacatggccaggcgtggggctcacacctataatcctagcacttgcggaggccaaagcaagaagatcacttgaggtcaggagttcaaggccagcctgggcaacatagcaagatcctgcttctaaaaagttatttattaaataaaagatttaaaatataaaaacaggaatgtaataaaaacaatctaagctttaaatcttcagattgtattatgaaaaccaaccactgaggaaagagtgaaagaagttctagaagttcttagttcttcattttaatattgaaaagacaatgatatgcaaaagaaactgttttaattttcatttcctttgatgatttgaggcatattaggctgcccacaaagtaaaaaataaaattaaaatataaggtaaatgaaaagttacaaagcatgttatgacaaaaatagtaggcataaaagaaattatcaatatgctaaactttttaatgtaacaataggagaaacataagcaaacaccttcaaataaaacaaagcaagaatccaaataggcaattgaaaaaacaatactcattgacaattaacacgaaaaaaatgtgaacttcataagtaacttttacaagtgcaaattaaaacagcaatggcataccatgttaaagccatcaaactggcaaaatgcaaaagaacaataatccctgctgttagctaggattgagggagagggccctttaatatactgccagtagaagagtaaattggtaagttggtactcttttggaggggaatttggcaacatacatcaaaagctttctaaatgcaaataccttttgactcaagaattgtttttccaaaagacatactcagaggtggccacaaagatttaactactctgatgggaagagagatcttcatatatgggacttctcccttgaaatggaggataatacacaagccacaaatagaaagagaacaacagtggattattaaaaggcagggccttcctgtctattggatgccctgctcgggtataacacaggaaccatgggctcccaagggaccctgggatcccgagagcccttctactccagtaagcctggcccctcagttacctgcatctgtctctggtttatttcttttttttttttttttttttcttgagacagagtttcgctctgtcacccaggctggagtgcagtggcgcgatctccgctcactgcaagctccgcttcccaggttcccgccattctcctgcctcagcctcccgagtagctgggactacaggcgcccgccaccacgcccgactaattttttgtatttttagtagagacggggtttcaccgtgttaggcaggatggtctcgatctcctgacctcgtgatccacccgccttggcctcccaaagtgctgggattacaggcgtgagccaccgagcccggcctctggtttatttcttgtgctacccctgaggcttttctaaatccctgtttaaacattttaggttatctctatagtagtcttggcaattaggggaagggagggaaactatgcagaaacaggataggagaacagtaggtgcagggggaggccagaactagagtcccagcaagccaccaggagactcaggtgagcacgccactaccggcccctgccactgtgtgctcctactgacttggctgtttctagacctaatattggctgaagctgccaccgctgcttctgctggagggactcctttgggatccctgagtgatcttgtctctagcacctggtcaaagtacgctgaggggacacaggtataccaagtactgggagagcatcactgtggaatgtgagcctctgggctgtctggggctttctgggcttatgtgtcaccacgactctcagggtgaggatttctccaaacataggaagaggacttagattgccaggaagcctcccaccgaaacaaatattcattacggagattatatcaagaataacacaccttgaggcgcagctgtatttctcattgctcattattgcctgcctcatgttctccactcctttagaggggggaagcccttctaggtggcttccaaaatagctcttggtaacttggagagaaaactggaaaggagactcaaaggggaattttatacactcagagagcaaaggacctcagaagtgaatccatatttggtttgcttttaggatgaaagtttaagtcgcagctctttgtatctgggtcctgttaccctgcaagggggcgagaaatgccatctcatgtacactggagctttacagtttacgaattgctctcacatttatgggtgcataaaaagtcaaattgcaatagcattgtgctgtgggaggtttgtggaggagctgctgacagcagctgtactgggaatataattatgcatatatcatttagccaatcagtcaatacttttaggcctttgtttctgaacacctactatgtgctggttatggtattctgtgctgcagggcttgtaagagtaaagaagttacagttgctgacttccatccatgaacagggggctaattacattaaaaaatagttgtaatttagcctaataagtacgaagcagagaggggaataagagccgtgggagaaccaaacatcaggtgtgagtcaaaaggcatgctgatttggccaacatttattaaattggctcattgcacacagggacagaagtatgagtgatagtggggtgtctctcagcatccccataataagaactgaagtctgtcacatctaatctattaggaaagtctcggtagctggctgttctcccctgtctccgttccccctaggaccccgttatgcatcataattcattatccttccttttactgaattagctcttctataataagtgggcattctcatagaccgtacctcaataaacagcattttcagtgcatacaagaggttgcaaaggggcttgaggtgacatttctggggactctcctttatgcaattatgagaagagggtgaaaaaaaaaatgtaagcacagctaatccagggaggcaaaactagttgtgcctgcgctctcctctaggggagggcatctgtcagtgctgagctgatgacaccagcctttctttcaccatgacctctcgacccagttcaggctgtcacatttctcttttgtgattacaaaaggcctctggggactctatgccgagaagtttaccttccaacccagccaagagatgaatcagacgcaaagtgactttatgagaaacacctctggctagagggttaactcagggctttgtattaatgagaccaagtttgctggttctgttgcagaagagccgccaattccccagagccacccatgactgtcagccctccaggccagccgtgctcacggtgcatggccctggaccctgggagagcctgatgtgggtgtcccatgagtcagcatggacccagtcccgtcactggagaaacagatccgacagccatgactcaggaatgcggatgttctgtcccaggagcaccgcagagaaaatcatgttgaaaccttgatgttattgacagaaaagaacacattgctcaatggagtgtgagtcaaataactatgaacttaaaaatatagtagtccttccttatgaaagctttcgtgttctgtggtttgttacttgcattcaaccgcagtctgaaactatttttaaaaattccagaaataaacaattaatcaatattaaattatgcaccattctgagtagtgagacaaaaccttgcaccatcccactccatccaatcccagcctgggatgtgaactatccctttgtccaacagatccacgctgcctacgccgcctgcccagtagtccttagtagccgcctcggttatcagactgactgtcatggtatcgcagtgctgtgttcaagtaactggttaatctaatcatagcctatgtagggttccagtttgaggcattttctgggggtcttgggatgtatgcccccaggaaaagggggactagtgtacctaaagtcatatccaagtagtacaaaagtcaaacttcagaaattctttctaagctcatcaaaaaaaatggtaaaaagtgtgcgaaggattgaatgcttgcatccctctaaaattcacatattgaaatcctaacctccaaggtaatggtattagaaagtgggaactttgggaggtgattgattaggtcataagcgtggagcccacatgagtgagattagtgcccatatattagtaaaggagatcctggagagctccctcacccattctaccacgtgaggacacagcaagaagacagctgtctatgaaccaacagtggggctctcaccagacactgaatataccagtgtttgatcttgaactctccagcttccaaaaccatgagaaataaaagtttgttgtttaagccagtgtataacatttttgtatatagcagtctgaaaggactaagatgcaagttacaaaaagtctttttttttctcattttagctgtttaattgcctttgcatagaacacaaatcaatttctgcattttctcggtagtttctctctgcaatttcctggaaatagaatctagaggggccttagcaccatgggcttcttaggctatactctagggagtgagggcttctttcctcctgaaaacttgggtcactcacggacgtactgatgttgatcctgcatcctgaaaggagcgtggaataaacaattgcatttctgccaagctcccttaaaagaagaggagaggctaaataggagtgttttctgtggctatgtctttggtcagaaatatcagaaacagtgaatttcttctgaagttcagctctgtcctctgtggctacagaggggaagcttcagactgtttatgaaaggcggtctggcttgcctcgcaatttcctctattttcttaaagaaaacaaaaagaataaattataatgataaaatacagataatcaaaaagaggaaaataaaagtcatcaaaaatattattctgatgttatttctttccaacacatttcccctgtgtttctatacatgcatgaaatatgtgtccctgtaaaaatgtacacatttcctccctttcagttacaaacaccaaacagcattagctgggtagggccacaccttgtctaagggatctgattgcttttacgatgtgacagctcccacaacttttcctatcctaatccctcagctgactttgccccccagccccggtgattctgggcaagacggtatttgtcagctcatgtccaatttccttccagccagggcctcctttgcaacacagtctgaccactcatgttgttcagaagtcccactttgtgattttaaagtggccacatcctctcggtgggcattacaaatatcacctcttacagaaattgtctggttctgcctcacacaatcaaacagaaaaaaatgataaagctcatttgtaacaaacttatctgttattggaaatattggagagcagagtatgccggaaaatagcagaaactgttcacatgcaaactttatcttacaagatagtatggagatcagtttcagtgagtgcctggatgaacttaattgagtgtaagtcagtaggggcaacgtgatcctgtgtgaggggccagctgaggattcaaagtttgatcgtctaagtatgggaaccataaggaaagtctcccagcctccatcacacctctgtgaacagttttagagcaacggccttgcggggtctgtgattagaggagagaactctggaaagcactaacccagaggacatgcccaggacatcggcgttttttctctgctttctctcccgctccttacctgcctccagcctcaccccctgttctccatttgaaaagcagagaagatgaaacctgtgccctttctctcctgtaaattttgcaagaatcaggtgaaaaagactccatgtaaacgagcctcgaaaacactagagtaggatgtaagtgtagagttatctctgtatatctcttagtttatgcaggctgcaataacagaatatcaatgcctgggtggcttgtaaacagcatatttttttcctcataattctggaggctggaagtcctagattaaggtgccagcagatttagtgtatggtggggaccaaattcctgcgtctcagtctttttgctctgtcttcacatggcagaagggagttctgtgggatcccttcttataaaggcactaatattcactagggctccattcttatgacctaatcacccccaaaggccccacctcctaatgccatcaccttgggagttaggatttcaatatatgaatttaggaggacacaagcattcagacgatagcattataataatgggaacattgctccattccttgaatctttggtagttacaacaaagccctgcacagagcttggaaataacaggtggctacggtcctgtgtcttctttcagtggcgagctcagaccatgtggggcctgttagcagggtctgtgcaaccccctgagagaccctggaataccttctcccagggagtgtctgctttcttttctctccagtttctcttctgtcaaatggacaatggacctttttccagcctgtttcttgggtgctgaagattcatgtgtcaccccgtgtcaggcctccagcaggtcttttttgtaatctgtttaaatggggatttctgaactatccccggaggatgcagttcagaggagatttgatttccagatgagtcagcatcagtctggagacttgatgggctgtgtcgtgctcccggtggaacaaagctctgccggcagtaggctgggcgctctcggagtcttcccttctacctggcgtttcccagccaggttagaaaggtgcttttgtctgctgatgtggtgacactggagatccttgccacttgcaatataatttttaaattacaataatgttcattgatgtattttattattttaaaagaaacatatatataaaaaataaaggtaaaaataatcctgttgtccagaaataatttctatgattacttatttgatgattagtaccttgatgattaagctttggtggtggtggtgggagggtcatggcagaaactgaatttatactagacatatatcatgtaatttgcttttttcaaatattttcttgttagtatatatgtatctattgtaccatctttaatggctgaatattatttcattatgtgggtgtacaaaaatattctctagattgaaaatattgtttctctgtaaaaatcaagccaaaggaatttttatttatttatttatttatttttttttttttttttgagatggagtcttatactgttgcccgggctagagtgcagtagctcgatctcggctcactgcaacctccgcctccccagttcacaggattctcctgcctcagcctcccaagtagctgggattacaggtgcccaccaccacacccagctacttttttgtatttttagtagaggcggggtttcactatcttggccagactggtctcaaactcctgacctcgtgatccgcccgcttcagcctcccaaagtgctgggattacaggcctgagccacagtgcccggccggaatatttttagaactatgttggaactagatacttttacataactttgattatattttagtgataaagacctagaagcagtattgttggatcaagggataggctttaagaaacattttactcaactgacatcctaaaagattcaactaatttgaactcagatgacaggaatagagagaagaacaactacagggcagaaaggaaagtctgtttttgagtggttacagaatctccaggtgggctctgagtcaaggaaagatgatggaaggggtggtaggacagttgtgaagcaccttctctccttatttttggtggaagttaggatagatttttaacccaaaacagctctgtgtcagttcccattagattctggcattgagttgtctcattttgttaacattacttagaatgtttaaatttcttcatcttcctgggtattttagtgagaaggaaggacaggctgcatcaaaatctgccatactcctttgggaaccatactccttacatctgctagccatactcctttgggaacagatgtctgtacttgggttagaatgttcatgtatatacctggcaaaaactgtcagctctactgtgattctctctccttcaacatcttcaaccagccaggctgaaaatgtgctggtcccacatagccggtgactctgcaaggctgacttctgatgcaaaactgtactatcagataccacataatgatgtttcagtcaatgatggaccatatacacgtaagattataatggaggtgaaaagttccctggcctagcgacgttgtaggtatcaaaatggtgtaggacaacacattaccttttctatgtttaccttttctctgtttggatatatctagacactgcagaaatatttaccattgtgtttcacttgccttcagtattcagtacagtcacatgctgcacaggtttgtagcctggtagcaataggctagaccacagaagctaggtgtgtagtaagttataccatcgaggtttgtgtaagtcactgtatgatgtgcgtgcaacaatgaaattgcccagcgatgcatgtctcagaacatatccctgttgttaaccatgcatgaccgtattccactcttcagatttcatgaagtgtatttgtagataatccctttatgtgaaattatctcatgtgagtaaagaggggttgtttgaagaagggtccttgtcatgtttctagaaatccttctgcttgtttcagaagctgcccttggagaaacaaaaaaaaggaactgtgtcataggtatctttatgtttccagtgcctagaactatacttggaacagggaaagtactcaataagccccagttggatgtgttgatcttctacactctcacccttgacacaatacagttcagcatcagtcataccagtttctgtattgctagcacagtagtccctcccttatccatggaggacacattccaagacccctagtgaattcctgaagcctcaggtagtactgaaccctcaatatacttagatttttttaagtgtggtcaccaagacagctactaattgacttacatgcagggagcatctacagtgtgcctaccttggacaaaggaataattcacatcctgggctggatggaaatggatgatgagagattttatcacgctactcagcatggagtgcaactgacaacttgtcaattggccaggtgcagtggctcacgcctgtaatcccagcactttgggaggccgaggtgggtggattatctgaggtcaggagttcaagaccagcccagccaacatggtgaaaccctgtctctactaaaaatacaaaaattagctgggcatggtggcgggctcctgtaatcccagctactcgggaggctgaggcaggagaatcacttgaattcgggagttggaggttggagagagtggagatccgcccctgcactccaaaccaggtgacagagtgagactctgtctcaaaaaaaaaaaaaagaaagaaaagaaaaaaagaaaacttgtcaattgtttttttccggaatttttcatttaatattttcggaccacggtcgaccatgggtaactgaaaccttggaagctgaaacggtgggaagtgaaattgaggacaagggtagactcctgtagcacacaccccattctctcaggcctgtgtgcctctagaaagcccaactcaagcactaagccccccgtgagcacaccaccacaagcaagggacttgccgtttcaaatgcctggaacagctattttcaaagtgtggtctggggacctctggggctttctgaaacccttttagagtcttgaggttaaagctgtttttataatactactgagaagtcattttcctatttcactctcatctctcatgagtctacagtggaactttctagaggctaataaagtgtgatgatgtcattcttctagtgttaatgcaatgtgtcactgtatattcttgcattttttaaatttctcagtttttagttctaatgtgataaatatcagtagacataatgcatgatcaatggctttttggtgtcctcaataatttttaagagtgtaaagtcccaatgccagaaactttgagaacttctggccttgaatcacacttcccagatcagggggttcttatccaggaatgagagggaaatggccctatttctcaatttcctgatttactcattcagtacatattttaccaagtttctatttgcgaccagacactgtgctcagccccagggcaacagtattaaacaagatggagggttgatcccagtcttgtggttgagagagataataagggaaggcacccccaaggcacagatgcctatgatacaatctcaaagaagagtgagagccagttaaacaggaaagggtcaaggtccttgggcaggagcgtcatggcgctcttaaggagttgaaagaaggctgcagtgactgttctagaggagcatgtggttcttgagatgaggctggagaggcctgcaaagaacacagggcctgtggagctgggaaaaggtctgggtcttgatgtcaggcaatgtccaagggcaatgaagggtttttttatttacttattttcagttgggataaaatgtacaaataaaatatgtcattttaaccattttaagtgtacaattcagtaacattaagtacattcacactcttgtgcaaccatcaccatccattccagagctgcttctcatccccaattgaaaccattaaatactaactcctcattccctcctccctccggttcctggtagtcactgttgtatgttctgtctctatgaatttaagtattctaggtctcacagagaagtggaatctcatagaattcatcctcttgtgtcttatttcacttagcctaatgcagtaaaaggttttcaagcccaaaaggatattggagaaatacctcaatgagagagatgggcactgctatctcaatgtctgtcctcttccttgccttctttggatactaatcaggtttgtatagtagcagccagtttcattcttccctctctcacctgaagaccaggctccagctgccttcaagaacactccgttggttctcagcattcagaaggagccatgtcatcctcttaaagggaacaatgaggggagtggtcagagatcatttcggactcagccttccaggtctgtgaaaaccatataataaacttaaaaataataataattttaaaaacccagcttggagtggccaggacctgagaagagagagtggtgatattatttcagctcagccgtgggtgctggacactggcttctttcatctatgggccctcctgtggctgaacactaaggctgtactgaccacgcagcagtgaccatgaagaggaactgggagtcagtgaggtgcacgcctggctttcatctttccccgacatcttcttcagggggtcctactttaacaagaatctattcctcctgtttaattgataggagcttgagactgattgattgcttttagaaattttaaccatcataggaaaaataaagaagaagtcaaatgctgagaatggaccctaatctcttagagcagggattgtcaaacttgggtatgcaaatgcatcgcctagaacccctttaaacatcttatctgggtcttacccccagaatttctgattcaatagctccaagatggggccctggacttggcatttctaacaagtcccagatgatgttgatgctgctggtactgggactgcattttgaaaaccactccgtcagggacaggcaggaatttagagagaccctttagaaagcacattttcctgcctacattgttcttcccacgcatgtcagcctggtaaggggcggggactccaggcccatcataggatgtcttttctgattttctggcttactgagtaaaagtcacctctccctcacaaatgacccacgtgactgtcatgtttccacccgccttctgctttctggagggagggaccagcagtctcctacggatcttttgaatgatgaaatggaacccttcacccttttatctgtctgccagccctgaagagctctgtgaagacccatttattgaatctgctgaggtttagtccctctgggtttgaagacaccaaagtctgttggtcccagggtcattcattattgggaagcagagtcattgtcccctcagtcagccaagttttcacctcatacttcacaggatgagcagttaagggaagaaagctttcatccttaattgcaaatgattcaaattgttgggtcaatgagctcctgtctcttctgaggagtggtaaagacattcgacctctggacagggacataggatgtaatcacttcctcctcctacagctgtcatttctctgtgttatctcagcactctggcagaagagctggtttgtaagaggaatagcagagaaggccagctagctcggcacagaggaggccgtgtaagacaaagaacctcaatatgctcccctcttccacctcccagacaccttgccaattgcagatcagcattcatgaggcttttctgagccaggtctgacaacggatcaaaccacactcaagtaatgccatcatctttccgggcaagatgactgcccttgctgtaataacagctaacacaatcatttcacctaacatgtattgagtagtacttagaacacgggctatatattttgtggacgttgcattacacagcttatttctcatcatgacgtacatgctataatgagatccatgtttcagaggaggaaactcattctgcaatggttagtatcatcaaaggaaaacagcctggacacatatgaaagacagaaagacagattttattcagatgattgcagtaagggacagagactctaatatgaattgagctcaactccaccaaagaaaaagatgactgaggttttctttttttctcttgttaagttggagtctcgctctgtcaccaggctggagtgtagtggcacgatctcggctcactgcaacctccgcctcctgggttcaagcagttctcttgccccaacctcccaagtagctgggactactggcccgtgccaccacgcccaactaatttatgtatttttagtagagacagtgtttcaccatgttggccaggatggtctcgggctcttgacctcgtgatcctcccacctcggcctcccaaagtgttgggattgcaggcgtgagccaccgcgcctggtcatgactgaggttttcaaaaggggaaaaaaaggaccatggagagtaaaaaaaaaaaaaaaaaaaatagggaaccaatatagggagcaggggcctacagagaaatggaaaaattacaggaagtgagtaaaggtagagaattactgaaagtggttgggacattggtggtttagcagcattgagttttcttgagcaaagagtcaacatgagggctgtggtcacccttacagacatgactcagtgcaggtaggagccaggcttatgtgtgaccaagcttcttagcagagcatttgggcaaggcctttacaccgcatgggagtctggagttttcagtaacttgccacacaggaaggccacacagctggtaggcagcaggtgcttgagatttcagcccaagcagtgggatggagttctgaaactcaatcctatactgcccctgaacactggtttctcccagcagccctcttgttttctgagctcacatttctgtcttccatttacctgtggagttagctaaacctgtgcttcagcgtcagaaatcctacctcatatgtaagttcccagagtgtctgcctccgtcttttctgcagccacagctctgccaagaacagaaatgtccttggccctgggtggtccttctccttacctccaccctcaccctcacctcttcaatctcctacggtttcatgccagagttgagagaagaccctgaaacctgagtgtgatctctattgaggtccctaatgacagcaagacatcctacctggcaacattttatcaaccttagaaaaatgcccccatccattggtactaattagcctttcctgctataacacaagtgagtcaaggttcccgggaaagacagacaacagaaaaacaggagctgtctgtgaaggatctgtgcagttcaacacaggccacttatctcaaaagcagtgcattttgtaaccataaatgaaaaatctgtttttaacttaaaaagtatatgtacaaagggcattatcagagatctcccagcatgctcatctgtcatcaaaaagagatgaagaccaatttggcgtattctagattctgtcttttctagggattgagatgtggacatatagagtctaaatactttctgatatctgcttgaatgccagatggcaactgcattcctgacctctggggaatgcaaagtctgtctgaagcccaaggagagctcagagcatcaaagatcctgaggcaggtactaaggaggtgcctccaaggaggtaggactgagtcatgacctagtctccaagtttgatttcagggggaaggaaggagacaaagggacgtgaggactcagaaggcacgaaaccaagtgctttgtagtttctgtgccttttgatttttataacaaccgtgtgaagtcagtaacactgtcttcatttcaagagtaagaaggctgagactcaaaacagtcagatttctcgaggtcacagtgaggaatttctggccttcacctggcttctggttatcattcagggttcatttgcaatgtctcttccttgaagggccttctctgtctagctcacgagcccacacctgcctctttaccttccaggtcattctctgtaatattattctactctcttgtctccaaagtagtcaccatcatttaacactttgtagttctttatttgttttcttgtttattttctacctgctcaccatgaaatacaagctgatgagcaatcaaaaatgtgaattggccgagtgtggtagctcacgcctataatcccaacactttgggaggcagaggtgggtggatcacctgaggtcaggagttcaagaccagcctgaccaatacggtgacaccctgcctctactaaaaatacaaaaattagttgggcatggtggcgggtgcctgtagtcctagctacttgggaagctgagagaggagaattgcttgaacccgggaggcgaggggttgcactgagctgagatcgtgtcactgtactccagcttgggcaacagaaggagactccgcctcaaaaaaaaaatgtgagggtatataaactctgagcccatctccagaatttctgattcggcaggtctgggccagggccaaatgtcaaaaagtttctaacattttcccatttctgttaatgctgctggtctgggaacggcactttgagaactagggccctaggatgcataagatacaaagaaacattgataaagataaaaagtcataatgaccttcactttctagttcactgctgtgttcccacacctgggctctggacagtacctagcaggtattcaacaaatggcttttgaataaattaatgagtgaaatactgaaatatgaattaggtctgtgacaccagagaccatgtctttttcctctgcagaagcccagaactttttcccagttctcagatcttgaccatcacatacctgatggtcaatggaaaagaagaccccagatggcctggtgcaatgcccttcagatagaaagactgctgttatcccatacaaaacatggtattagtcctttccaagtaggttctgattaggtacaaggaaccaggcatgctatcttcatttctttgcaagagatccagaaaatatgtcccattgcatgaaactagagagggtttgaaatcagaccctttgggaatattacaacagtggcccccatctctagctctgatggcagtggctgctgccatcatgccggctgtagcagggaagtacatctggggctgcacactccatggagccagcgggagccctgcccttctgcgttgggttgggagcttcctgtgccactgcagccgcccaaaacgcagctgcagacccaggcctcctgctctacagagtaagctgcccaaactgtagttgtggatcagagcctccctgtgctcttgggggagccaggaacaggcaggatctgccttcccaggtgctctgggcctcctgctccaggaagcaggcaggagccagggacaagcaggagccctgccccttccaggttggcgaggcaagagctcctgggtgcagctgcggcacaggacccaggcatctctgcagcctgcatccttgggtctccagaaaggacccattcccccaccttaccctctccctgccccccatccctgcaagctctgcagtgcccgctccactgcctggcctctctccccttccagagcctgctctgatctcccagggggaattggggctgagccccagggccatgaatggcagcaggaggcagattgattcctggccagaaggggccaggtcccagtaaggccccaccttccggccagggagggcctcttccagagtaccctctctgcggatagctggagacgatgggacaaccagctgcagagaggagctaccctttccgctgagacctttagagacctgcagagatgttggaatgacttgcctttggaaaggagccatcctctcctgggtctcctctctgctaagagttgaacactcaacttgacgaccggcctacagagaggagctacccactcctctgagctgttctaatactaaataaaatttttgttcatccttcagttgtctgcctacctcattcttcctgaacgcaggacaaaaaactcgggcaaaggcactgtggccacagaggtttctggccagaaaaatcgacatcccagagatcccataacatctccacttggctcccctgctggccctgttcagaaaccttagttgtgttattattgattgagagaaggggagtgagaactcaattccctctgccagatttgatcccagactctttccctgtgaaccgatgaaatccacagctggtagtaatctctcctgcctcaaaactcccctgacattttatctgtaaccctcctaaaccacttatttcctaggtttcactataattattcattgtgtgcctcatctcccctgctgttctatggccttctcatagacaatgacagggtcttaatcatctctgtgcatgccccaaatttagaacacagcctcagatgctgaatgaatgaaagaaagaatgaataatacaaacgggaagaaagcaaagaggaacttgcaaagagaactgagatgccatgggtatggtgatttactctttgttaggaagttatttcaagagtacatcatggtgaagcattcaaaacttgtgtctagcatacagttggtgctcaataaatgtttacaaaagaaaggctggaattcatctattgttctacatttctgactgatatggcctcatctcaaaaaaaatatatatctggaaagtattttctgagttgtttttcctataggtggatgttggagatttgacttcaaaccctgggttcacttgggctgtgtaggtctttgaggtgttagtccctggactagctgaaatttaactggaccctagggatgaagtcctcatttaaagagtggtcaccagttgcttcgaacttgcttcatcgcccaggagggctccttctcccctcccagacataacttccttgattaagaagccacacatctgccttggaacactaaagcggtcaccttccaaggccttggtcttagggtgcaggactactggaagaaacatttagaaatagaaaatcaggctgggcacgatggctcacacttgtaattccagaagtttgggaggctgaggtgggtggatcacctgaggtcaggagtttgagaccagcctggccatcatggagaaaccccatctctactaaaaatacaacaattaggctgggcgtggtggctcacgcctgtaatcccagcactttgggaggccgaggcaggtggatcatgaggtcaggagttcaagaccagcctggtcaatatggtgaaaccccgtctctactaaaaatacaaaaaattagtcgggcatggtggtgggcgtctgtaatcccagctactcgggaggctgaggcaggataattgcttgaacccgggaggcagaggttgcagtgagccgagatcacaccatcgcactccagcctgggcgatagtgtgagactccatctcaaaaaaacaaacagacaaacaaaaacaaacaaacaaacaaaaatacaaaaattatccaggcatggtagtgggcgcctgtagtcccagagacctgggaagctgaggcaggagaatcaacttgaacccagaaggcaggagttgcagtgagccgagattgcaccactgtactcaaacctgggcgacacagtgagactccatctcaggaaataaacaaagaaaaccaggctgtcataaatgttcctagcttcagtacatgtttctgttgttgttgttgttgttgttgttgttgtttgttgttgttgttgttgtttgagatggagtttcagtcttgttgcccagctggagtgcaatggcacgatctcggctcaccagaacctttacctcccaggttcaaccaattctcctgcctcagcctcctgagtagctgggattacaggcatgcgccatgcgccaccacaccaggctaattttgtatttttagtagagatggagtttctccatgttggtcaggctggtctcgaactcccaacctcaggtgatccacccgcctcggcctcccaaagtgctgggattacaggtatgagccaccggcctggcctaaatgtttatctttatcttgtgcatctagagccctggttctcaaagtgtagttcccagatcagcagcattggcagtaatgggaaaatattagaaatgtaaattattaagcttcaacccagacctgctgaatcagaaactctggggaccttatgaggtcagcaggacaggtagcatgatcatcatttcactgatgaaaatggagattcttgtccaaggtcaaatggttaggtaataataaagtcaagttctgggtctagaatctggattttttttcccctagctccagagctctcctttcacttgattttactgtcccgctcactgtctgtacagactatttcttcagtcttttctctgctcactgggtttatgttgatctcttgtcaaagctggctactatttccatagaacctgctttgagcgcctttattccagaactactcattctacttccagcctgtgtgctttggggagcatatcttgcaggtttgaaggcacagatccaagcttctccaactttagggtccacatgcgtcacctggggacctggttagagcaccgagctctgattcaggaggtgtgagctggggaggagtttctgcatttctagcagcattcaggtgatggtctcagtctccacactttgaacagaagggcagtaggcccctttggtgcttttgtctacactttctccatgaagagcctgcaagtttcttgagcccaggatcaagtcttgcctgtcttcatactcctgagtgtcatgattagctcctggaagggagacaaggaaggaaagagggaggaaagaaaaaaagcaccttttccattggcatctacctttttgagcagagaagtgggaagataaggtgctcacttccagtgtcttgaaacctcacttctacctctgggtgccaacaacaacagccctgaagctcctttataattttcaaagtccaaacagaggtagtggcaaggtttgtggctaccgaagctctggcattcatctggcacattgttgcttagtgtacaagcgaagtgtgcgtgaacatcttttgatttggagaaaatgccaggtttgagacatagcaaccttgctggagccccctgaagaagccacaccaatgtcaaggaatctgattgtgtagttctggtgtttgcctattgttgccatttaggatataatctccttaactccataaatactaaatccaagcactttggcaggcaaaactgcctgtgatctcataaaacatataatggccatctggcagaaaccattgatgttgtcagaaggagatgggagatggacagcaatgtgtgagtcatttttacagtcctccccgtgaagaccaaagggtgttgtttgacagctcaggaaacaggcagccaagaccctgtcactgtttggaactctctagagacctttgaagaaagtctccctctctgtggtggaaagaaagagagccacagtttcttgagtggtacaggtgaggccataccgcaaagacttgcacagtacaagtggatctggagtttgaagtaaagtctccacctccctttccttagggaaagccactgagaaagtctgtacagggaagtgctggcagggttgtaggtgtttccaagcgtcttcagttctaagactgtgacccttggctcctcatactgttcctggctattggtaagaggaaaagtctgttcacaccacttcatccagggctgagaactgagctggatttccagtttggggaaattcatgtttacctggcctctttggtgaatatctatgcctcccatgtgcacaggattgcttctgaggcaaagtctggtagcaatagcctgccccatctgtaccaccattcatgtccccattcatgggtcataaaacctctgccctctagccatcctgcagaacttgcatggctgaatgcaccatgctctgaggcactctgtgcctttgtacacattatttcctcagcccaaaatgcccttcctttcttttttttttttttttttttgagacggagtcttgctctgtcgcccaggctggagtgcagtggcgagatctcggctcactgcaagctccgcctcccgggttcacaccattctcctgcctcagcctgccgagtagctgggactacaggtgcccgccaccacgcccggctaatttttttgtatttttagtagagacagggtttcactgtgttagccaggatggtctcgatctcctgacttcatgatccgcccacctcagcctcccaaagtgctgggtttacagtcgtgagccaccgcgcctggccccccttcctttcttttctccacttcatgagtgcctattagcccttcaaagctcagtttaagcatctcttaagagtcccgagatacccctttcatacttacggcagtactccatgcctctctacatgctgcatattttgattttgtctatctgtctcacccgctagttcatctcctccttgttcgcctcttggtctctgtgcctagtagagtgtcagctacatagcagacgcttaacaaattttagatacttaagtagaaagctgcttataattatacccagcaaaagacaaggccatttttgtcaaggagagggtgaaatgaatagcttgatttcttcccagttttagcattaacatgtctaatgtcacatgtacagcggtaacagggaagggttccaaagtcctagttacagtgacagatttctgttcagagcaaagtctgcaaaacactgctcccacttgtcaccttggcacttcggtctttattgtggtcaaagccacacactatttgaaaagttactgggtaatcctaaccacagatttcccttagggctagttaggggtcaaagaatgctttgaaaccaaaccaaaacttccacccaagtggaactgtcttggtctgaatcgtcccagattctgagacaagggtctaagtgcaaggagattatttgggagagatccaggatgtgctaggaagagagagaggggtgagacaaggaagcaaacgaagccagtgcaaggcgaacagaagagtgggctcctcctgaggacagctggggcttaatccgcccccaagaacttctggacaggacgtagagcacatcttaggcttgccctgcactctgtcttcattctcactatttgctcatccattcaccagttggaagacatttggttgtttctagatttgggctcttaacaataaagttgccttaaacatccatgtgtttgtgtatacatatgttttcatttattttggacagatacctagaagaggaatcgctgagttgaatagtggaatgataagtgtatgcttaactttataagaaactgactgttttccaaagtggctgaaccattttaaattcctgctagcaatgtatgtgtgtccaaatgttaccaaaaaaaaaccaaacaaacaaaacaaacaacaataacaacaaaaagcctgtggcttgcttttttattttcttaacagtgtttttagaagagcacaggttttaaactatgatgaagtccaatgtatcagtgtattttcttacatgatttgtgcttttcgtgctttaagaaagctttgcctaacctaaggtcacaaatattttttactctttttttttcccctcaagtttgagcgttagctctttttttcagttgtagatccattttgagttaattgtaactctgatgtaaagtaagagttgagactgattgatctttctatctattgacatacagctacccaattgttccagcaccatttattgaaagtacccttccccagtgaattatcttggtaattttactcaaaatcaattggatacttatacttgtatctatttctacactttctattatattttgttcattgatatttctactcttgcaccaaataccacactgcattagccactgtagctttagagtaaatattgaaatcaagaagtacatgtcctccaatttttttatttttcaaaactcttttggctatcctctgttctctgcattttaatataaaagaatcagctcatcaatttctaaaacatgtctcgtaagtttgattgggattgtgtggaatctttctatcaattttggcataattgctattttaataatattgagccttcttatcctgtcttttttattttctctcagcaatgctttatacttcctgatgtatagatattgcacatgttgttaaatttgccgctaacttgctcacatatttatgctatcttaatgatgttgtttatttctatttcatagttgactatttcttcaaatgtattcttagattagccacattttaatgtacttatatatacataattatactgttgtttattttgcttacttactgattagttgtcttgttctgggaagattttaagaaagtttatgagaatgtataaaataaaacaagaactttgaagaaggacagagtgaaaaagggagaataaaaggaaagggacatcaggtaaaaccagacatgaaactaatacacaaacacatgataagttccaattaacatgtgataaattgctttctagatgccaatgccagtgtaaaaagcaaaatctgattatgacataattcagagcatcctaaagtggcaaattagaaaagcacagccgtttcttgtacttttccccagcagattctcaaaaaacaagatataacataccacgtaatagaatggatggccgggtgcgcggtggctcacgcctgtaatcccagcactctgggaggccgagacgggcggatcacaaggtcaggagcatctactatgtagctgacactctactaggcactgagaccaagaggtgaacaaggaggagatgaactagcaggtgagacagatagacaaaatcaaaatatgcagcatgaagagaggcatggagtactgccctaagtatgaaaggggtatttcaggactctaatgagatgcttaaactgagctttgagagctaataggcactcatcaagtggagaaaacaaaggaaggggggccaggtacagtggctcatgtctgtaatcccagcactttggtgggcggatcatgaggtcaggaaatcgaaaccatcttggctaacatggtgaaaccctgtctctactaaaaatacaaaaaaattagccaggcatggtggcgggcacctgtagtcccagttacttgggaggctgaggcaggagaatggcgtgaacctgggaggcggagcttgcagtgagcggagatctcaccactgcactccagcctgggcggcagcgcaagactccgtctcaaaaaaaaaaaaaaaaaaaaagtattagattggtgcaaaagtaattgtggtttgtcattactttaatggcaaaaaccgcaattacttttgcaccaacctatataacaattaaggtcctcttcaatgtctttatggaggttatgctgcatttggatgtgctgtttcttttgtcacttaagatatagagtagcagtgctaagacaatggtctccaaggcaattaaatttgactgcaacctcaggagagagacactgtattatacctggatttctttccctgttggtcctggatttctttcccttagaaactgtgtgaggtcatgtttgctgttttgaactgctaagtttgggcaacttgttatgtagcaatagataactaatatagattttggccccaaactatcagttattcaaagtatgatttatagtgcttacttcatgccaggtattttactaagtactatgtgagtattatcttacttaatcctatgtaaccctatgaggaatgaaccattatcagactattttacaagtggagaaattgagggcaagaagcatttatgccaaataaagccctgggagtctgattccaaactctgggcttttatcatcctgcaattctgccccttctcctatctctcctaagaagatcaggccaatgggttctgtgtgggatgccttctcactagggacgatggatattcttcccaggatggtgagaactggttctcaagaagtgtaaaaaaaaaataaataaataaatcttagtacactggtttgtgatcctctgaagctcaaccctacctgcctaaattttattccttagtacttaatttcttttttggggggagaatttaaataaaatttaacttttctctttaagtgaggataataaaacaaaaattgagaaacactgctttatgacaaaggccaattcagacttcttctctgtaagccaggaagttcctgatgcagaggagcggcttagttaacactgttggattgatagactctggtctatgaggttcaaatctgtactttgaaaataatatctccagcaagaaatcaataaataacacaagctaaagggatgctctgggttccacaggaaaccaaggcctctgcaaagaccggaggcagaggcaacactgctcttaagagtgagggttcagagctggctgacacgaatatcacctgtcagtaactatgatggaaaatattagtttacattcttcagttccctggtgactgaccatattaggcctgagcaacgtatcttaccacacttgctaatctgtggatttctaaaagtggataattagtccagacagttagagctcaaaatgaaacgagcttaagtctttcaggaattacagcaggtgcctgaggggatctgccattcaggcctgacccatttctgcctgtgcctgggagagagctcatctcctcagactgatagatctattggcacattcacccatttatgcccaaactgagggctgctaccctggcaaacttccactccgagataaggcaggaaagtggtggctgaagcctgagttcttcttccaatcactgcatcctaagcatatggataaattcaggcttatgagaacgtgatgagggtaagaacagagactcagcaaggctgctagaactgcccagagtcactcagccagtcagcagcagagttgagctagagtccccagaacctgacactgtccagggtttttcccattagcccacactgtctccatgcgggtgtttggtctctgaagctctcctcttggggtaaggagaatgaaggagcccagttattttctcccagtagagttcatagcttctcccttcccaaccctccccaccttctgtctggtttgagtttactgtcaaaacatgcagtcaaattacttgtctgcagacatttttgctggccttagtgtatccacaagagagctgttaatgattacccttcctgcccatacttagctcatcttcagaagggaactgctcattatcattctctgactgcaggctgggccggctggaaacagtcagtcaggattctagcagtggtagagctggagtcctggcattttctgccgttgggtcatattgctaccaaaagtgactcttggctcttgggaggctgtgggcctgtggtccctcaagccaggcttcttggagcttgtgagaaagtaagtaagtgggggccagggaggggggcacttttgttcatagttgacttccaatggcccccaccaaagccaattacataattatcgggactcaatacaaaataaaagtgtggaactctttgttcaaaaagtggagaaaaagtgctttttcttttatcccacggtctctttcaacttgtcatgattttttttttaattttttgctattgaatgtcactctgtcaagagaaattaaaactttaaattgttgtcataaattttaacaatcatctttgtattgtgcaatgccagttttcaatagaaactaaaaaacttgtgcacagtaaaggaaacaatcaacagagtgaaaaaacaacctacagaatgagagaaaatatttgtaaactattcgctctacaggggattaatatccagaatatacaaggaactcaagcaaaaacagcaaaaaaacaaacaattcaatttaaaacacgggcaaatgatctgaacagacatttatcgaaagaagacatacaaatggccaacaaatatatgaagaaatgttcaacatcactaatcatcagagaaatgcaaatcaaaaccacaatgagatatcatctcaccccagttaggaaggctattagcaaaaagacaaaaacaactaatgctggtgaggatagagaggaaacagaactcctatacactgttagtaagacagtaaactagtacatccactacgaagaacagtatgcagactcctcaaaaaaattgcaagtagaactaccatatgatccagcaatcccactactaggaatttatccaaaggaaaggaaaatagtataacaaagaaatatctgcacactcatgtttactgtagcactattcacagtagccaagatatagaatcaatctaggtatccaataacagatgaataaataaagtatgttatatatgcacagtggaatactattcagccataaaaagaatgcaatcctgtcattcgtagcaacatgggtggaataggaggacattatgttaagtgaaataagccagaaacagaaaattaagcattgaatgtcttcactcatatgtggaagctaaaaaaaaagttgatctcatagaagtaaaaagcagaacagaggatactaaagactgagaaggatgtagtaaggaggataggaaaagatatcttaaaggatacaaaattacagctggttgggaggaataagttccagtgctctagagcactgtaggatggctatcattgataataacatattatatatttttaaatacctggaaggaagatattgaatgttctcaacacaaagaaatggtaaaggtttgctatgatggatatgctaattaccctgatcaaatcactatccattgcatgtattgaaacatcaccatgtaccccatgaatatacacaattatgtgtcaatttaaaaaaaaactaaaaatgcaacttataatggtgtttaactcctaggtgaaatcaccaaaattacacccagcatatctcttagcttgcacatgcatatgtattttgttcttatcggaacaggggaaatcctgcacaagagtaactcaactgtttttatttcacttccacctttggctttctggtgaaaaaattgaaaggactgaaaggaaaatgaactttttctttccttttatgtcatcattttcaacataaatggttggctaatacagggaaggaatataagtaagaaagcttataatagaattccttagttgtgtgtgtttctcaatgtgttgctgtccattttctccatttgcagcaagttctggctggaatggaaagcatggcctctcagggatttccatgcccctgactactcatttgtaaacagaacacacatagcctgtacttactttgagtcttgctgagtcccatgcatggtgggcctaccagaattctgtgctcatggggcatggtgaacactctatataaatggggtggcaggttgcgtgtatctctgcttcatgagcatgctccattgtccctttggacttcacttacaaaatggaagttcaaaagtaaaatgaggaatttcaagatgacgggatggcagtgaaacataaaaccaaacatgaggtcctcttgagcacggggccgtgtgtgacaagcacacatcacaggcccatgaaactgtccctggtacccactctgcccccgtagacccaggcctcaatctgctaccaagagatagaggaggaatgttagaaatggccggaattaagtagcaaagtatgagacagcaaatctgtgagggaaggaaaaagtgtgttgaggttcagatgttctcaatcctgactgctctttagaataacctggggaattttaaaaacacgcaatgtctaggctccaggtctggaagttctgatgtactggatccagggaaggtctgtacatgggtatagccaggtcatgctaggatgcggccagaatctgccatgtttcaccctcacgctctgcaccagctcagctgaaatagggttacctgaggctgcctctaaagacaaatagtcttgagtgtctgttttctttttggagggttttttgcttgctatttttggagctattctattaaattgttctaattaatggtcattgacacaaaataacaatgtatgttccatctttttcagctaaaatctaaagttgtttttatcatgtccaaaaacttagtgcagtgaacacaaatactttgtctggaccacttattaaaggtgcaattcgactcttcatttcagctcatcgcagagcatagatggctcttctccatgttagggatgggtatggctagtgcgtcagtcaaacctaccgcatgcttccaggtgtgtccgtctttaggattcaggtttcagatgtactcctgagaaatatggacgaattaacctataaatttgaaggtctcactatttaaagaaatctcacaccgaatctataataagaataatagtctactttgacctttagtcagtatttaaggttatagctcattttacaattaagatcaatgaatatttacaagttaaaaacttctgctgggcatagtaagaaatgcccataatcccagctactcaggaggccaaggcagaagaattgcttgaggttaggtgttcaagaccagcttggacaaaatatcaagacctcatctttaagtaatttttgttttaattagctaggtaggtgcagtggctcatgcctgtagtcccagctaccaaggaggctaaggccagaggatcacttgtgcccagaagattgaggctgcagtgagctataatcgccccactgcactccagcctggtgacagagcgagacgccatctcttaaacaaaattaagagacattcttgtttttgccattttaaaaaatatctcattctagtacagacatcatgaaatatatagactgaatgttagcaacaattcagcccagagattccccaacctcatcaccattggttgcttggggcaactctgctaactgggagtcccatccagagattcagattccccacatctggtctgggacatgattagtcattgtacaaaagctcctctgctgattttgatgatcaagtaggctttagaataatggatctaactccaaagtcttatattttaagcacacttcatccctagtactaaagtaaagtcctggaaacaaaggactaaagatatgtttttaatataaattctagaaaatatagagaagtaaaaagagaaaggttatcctttatcctatcaactagatagaactactgtttgtctttccagtctttttttttttctactgtataagtgagtgatgttcaaaatactatagcatgggcattaacctacgattgttcactgtttacactgttgagtatatatcaggtgaaaatcaactctaagtgtaagcatatatacatatatatatagtttttgttattttgtttgtttttttttttttagatggagtctcgctctgttgccaggctggtgtgcagtggtatgatctcagctcactgcaacctccacctcccaggttctagccattctcctgcctcagcctcctgaatagctgggactacaggcgtgtgccaccacacccagctaatttttgtagttttagtagagaaggggcttcacgatgttggccaggatggtctcgatctcttgacctcgtgatctgcccaactcggcctcccaaagtgctgggatcacaggcatgagccaccgcgcccagcctaagcatatgatttttttaaaaaaattatatgacatagtatatacaatttggtaactggatttttaaaaacttcaatatatttttaatttaaaagggggaattctatagggttcagcccccagttttttcctcttttcacactatcttctttccctagacaattccatctacttctgtggcttcaattcacaactatatttttcctaccagattttacctgtcaccccaattcttctctgaggcattagccctctctctctaatattactgattagcagacatgttcacatgaacgtctctctaggcactttgacctcaatatatccaaaagtaaactcaggatgttcttcctccaattctgaggaaaccagacgcccaaaccatccagactatcaagcaccattcttgattccttcctcatactcagtgctctacaaatgtaatcagagaccagattaaatggattcagcttcctaaagatcccttgaacataaccatttctctcctctccactgccatctctagaccaagccactatcatttgtcacttggacaattgctgcacattcctacctgagccacaacttattcccatgaaagtgaacaaatagtaatataatattttgaaaacatttactatgttttgctcactgattcattttttgttttccataatgacattagagatatacacattagccaggcacagtggctcacacctataatcctaagacttttgagaagccaaggagggtggatcgcttgagctcaggagttcgagaccagcctgggcaacatggcaaaaccctgtctctaccaaaaatacaaaaattagccggacatgatggcaggtgcctgtggtcccagctactcgagaggccgaggtgggaggattactagagccagggaagttgaggtttcagtgagccatgatcgtgtcactgcactccagcctgggtgacagaatgagacactgtcccccaaaatagaaaagaaatacaaagaaatatgcatattgaggctgaggtttgctgcccaataaaggaacaaattctgaaaatgaaaagtcaaatgcttcactttttactccaaaaattggcttataaaactgtaaaagggtaaaataattttgaaagttaaaactttgtttataaacaagagcttttgtgaaaggaaaatagttttgaatcctcaaaggctaagagcctaaaggacctcaaacctaaagctaatgctataaacactgaggttaggaagaaagcatcatcctgtcctcccaaaagaatatgtcctccaaggccgggtgcggtggctcacgcctgtaatcccagcactttgggaggctgaagcaggcggatcacgaggtcaggagatcgagaccatcctgcctaacacggtgagaccccgtttctactaaaaaataagaaaataaaaaaataaaaatagccgggcctggtggcaggcgcctgtagtcccagctactcgggaggctgaggcaggagaatggtgtgaacctgggaggcggagcttgcagtgagccgagatcacaccactgctctccagcctgggggacagagcaagcctctgtctcaaaaaactcaaaaaaaaaaaaaaaaaaaaaaagaatatgtcctccaatatgccaattgtccaattgtcctcccaaaagaatatggcatttaaagggtctaggagagagggggcagggatagaaaggggaggcaaatgatagaagccctagataattttgcaaagatcctagtctagagaattcatcacttcctagggtttatatggaaatttggtattcagcatgaccttgaggagagaattaacaaagaagagaaatctaattatcctctcaacagagacagaaaaagtatatggtaaaattcatcattacctctgagataaaaacattcttagcaaaatttgaattcttagcaaaataggaacatctttaatacaataaagattatgtacaataatcctacagtaagtaaagtttaagtgttatcatactcaatgacgaaatagcaaagttgtttttctttgagcttgagaacaacaaacaaaaagaacagaacagggacacttacaattaccacttgtatataacaccacactggacatcccattatcttgcaaaaagccaaggaaaagaaaaaaaagctaaagattataaaggaagagaaaaattgtcattttccacagatagtacaattgcacaactataaagtctaaatcagatctagaactaaattattaaattagcaagatggcttggtattaaaaagtcaattgtatttctttatgctaacaaaacattttagaaactgacatttaaaaatataccatttacaagctggatgtggtggctcacgcctataatcccagcactttgggaggccacggccggtggatcacttgagctcaggagttcaagactagcctaggcaacatggcaaaaccccatctctacaaaaaatacaaaaaaattagccaggcctggtggtgcatgtctgtagtcccagctacttgggggactgaggcaggaggatcacttgaacccaggagttcgaggctgcagtgagccaagatcgtgccactgcactccagcctgcataacaaagtgagaccctatttttaaaaaaaagaaaaagaaaaaatatatcatttacaatggcatcaaaactattaaatgcttaggaataaattcaatgaaagatgcaaagggctctacagggaaattggaaggaggcatcatattcagtattaaaactaagaaacttaatattataaagatgaaattttccccatggtttaggccaaaaacattggaagcatccttgactcctctgttttgctcatatcccaaatacaatgcattagaaaattttattggctttactttcaaaatgtagtctgggtttacccaaaagccaacacggagtcaaaagtcaagtgcgattagtcagccctcaatatccatgaaccctacatccatgattcaaccaaacaggcagtaaaaaaaatttgaaaaaaataataaataacgatacaaaaataaaaagtaattgacaatgacaactatttatgtagcgtttttttaggtattgtaagtaacatggaaatgatttaaagtatatgggaagacgtgtgtagattatatgcaaatactacgccattttataactgagacttgagcatccacagattttggtattctctgagaagcctggaaccaatcccccttggatactgaggatgactgtattttatttagaatttaaggaaaaccaataaggggagtaggggaatgaaaaaggaaagggaagaagtcaacatagagcaacatgtgagccactccaagttcaccctttgttgcctgctttgctatgttatagacgggccctgtaaagacttctcctgtgccaggtggcacaatgctaagtgtttacagtagagggtgctggagggacagtagaatagagagaggtttcatttcctagttctaatgttctcctctccccacatgccttaagctcatccagcaactccagcagcacccagtctcctgcagtgcggacagcttctccagggcccagcttttacaacctgttgtgaccagcagtgcccagcttcccccagaactcccttgaacagcctaggagtgacatgacccctcatggagtctcctgtgacaattttccctggtaatccccaagaaggttttgagataatttctgagagatgaaacttctctttgacatcttcccttgaaaatatggagggcaaatttccagaaagttctacagcatcacaactcagggacttgtccaccatccagtgagccgtgagtgaggtgaggtgttcttattccaggttctttaattcttggagtgctccacctcagccccaggggtagtggctgttccttatatccactagtcctatattcttcagagttctcttacatcttgctatctaatcccttgttactgcaaatcctctcctatattgtataagaggagcttagaatataatattacataattatagaacaactctataattacatgataattccttatattaagcttttcctgctcaaattactatgtgattctgccgtctcatttaattctggcagatacagataccttattaacccggctgccgtgatgggcaattacagcttaactccttggggaaattctgaaaaatagtataaaatattccacttaaggggtaagaaagccatgatgtttttacttcaactcctgtcaatcactggttgggtgtagcttctgggaagtgtgattcccggaacttccagcttgtttcccacatagcagagcaccttccacaattccagaaaaagacctcgggcacagagtcagagattcagggcagtggaactcctgcagaacacagtgaagcagcaggcgccagggattacagctgggccagtgacagagtctattatagcccaatcactgtagtcactcagttcttctcatgcctcatgttcagatcactccaccctgccactgttccccagggcagtggctggtcccagtttttttttctttgtttgttcctgcaaaaaagcaagacaaggctttcatgacaaggattaccttcctcttctaccacccattctagattcatcttcctctcaaccagtattccactggcttagatctaagcagttccctggtgggagtggggtggtctagaccctctccccaacagagcctgagtcccaggttatcatgccctttcccttgccaagctatggttgctctaactccctggtgtttcagacatgatccttcccatccccattatgtagcagaaaccctatttccttaaaataattagggccaatagtcactcctttctttacctgttgatctactggcataaaaagcctatgagtatcagctataaatttagtgggacccttccgtgtgcccctggtggagccatttctctcccgggaatcagggcgtctgatccagcagagcctaaagttgcaggaactggaagcacaaatttccaaagtgggttactggaaggattggggaaatgggccattctcatttccacttttttttttttttttttgagacagagtttcatgcttgtcaccaggttggagtgcagtggtgcgatcttggctcactgcaacctctgcctcccaggttcaagcgattctcctgcctcagccccctgagtagctgggattacaggcatgtgccaccatgcccggctaattttttttttgttttgttttgtttttgagttggagtctcgctgtgtcgcccaggctggagtgcagtggcgcgatctcggctcactgcaagctccacctcctgcgttcacgccattctcctgcctcagcctccctagtagctgggactacaggcacccaccaccatgcctggctaatttttctgtttttagtagagacggggtttcaccttgttagccaggatggtctcgatctgctgacttcatgatccgcctgccttggcctcccaaagtgctgggattacaggcgtaagccactgcgcctggcctaattttttgtattttcaatagagatggcgtttcaccatgttggccaggctggtcttgaactctgatcgcaggtgatctgcccgccttggcctcccaaagtgctgggattataggcgtgagccaccgcgcccggcctcatttccactttcgattcctggccatatgtattccatctattgcggatctgatctgacaccatataatgcagtgcttcccgtacttcagtgtgcaatgcctagaaagcttgttaacattcagatttctgagccccacctcggagaatctaatacagaggtctgaggccaggtccaaggattctgcatttctaacaagcccctaggtgttgttgatgctctaggaccagggtccacagcttgagactcactgaagtatattccacatcttgaaaaacagggctgtgtacaccacaggatgtcacccctaagctgggaatctggatttgcctttcaggagactgtcttattgttccatcaggcagtacgatgtggtgcagcgattccacggccacgtgcctgcctcactccccttttactgttaagtgggtccgttggtaagaagcaatgtcaggtggggtcccaggtcaataaatcagatgccccagtgaatcccgggtggtggttttgcagaggcactgtagacaaagtgaccttctgagttcctgagaaaaagctctcagacatgaacaagcagacacaggaagctggaattgtctgttgcattacttaagataaggtctgaggaagaggtaggacacggacatttgtgccacacacatactcagaatcggatcctctcaccgtttccattgcaaccactcagcccagactgccatgatctcttattcggattgtgtaataacctctaaccagtctccttgcttccagctttctccctgactccccagcccccataatcatcttgtctctgcataatagtgggagtgacactgtattaaaatataagtcagaatatatccttcctctgttcaaaatcctccagtggatgtttcacgtggagaaaaatccacaggcttacaatgaccttcaaggtttgtgtgtcagtaaatattggaaagctgctgccactggaaaactttgcaaagaaaaagatgttggagggttagtgggaaagaaagtgtgctggtctgtcttgattaaacatgcctttgggaaatctggctactccatagtcaaggataattgatatgccccacttcactggcttagggtgcagcttaagatcatatttcttgtgtgttcaaattatgactcccaggcctcatcccacaaattgaaagaagtgcatttttctctccctcccaagataagcccataatccatgaggaaatttgcctatacaaaagaatttgcactgctcataatttcctcaccaataagaaacctgttatcagccaggtcctctgaagggtcttgtcttcagatggtgcttagatgccactcttggacctttaaaaggggctacactcactgtgggtgaccctcacaaagctctcaacactacagctcttttataacatatgtacaaaaatgcaatcaagtgcaaaaaatatgtacacactttcccaaaggtatacttattccaggcaactgagagcagaaggcagaaggcattttaccatgagctcaggaccagctgtcttgtgatgacctctgttcccactattaagccaggggcgatcagccaagagtaccctaactctcatgataatctcctcttgggaaccaatatgctcatcttctgacaactggcctcaattgcacaacttcagcccatctgacattgcaataactttgaacgacacagcaagggagccaagagcttgctctctcccatctcaaaaggttttgctacttggggaggaaggatggttttatccacctataaggatggagcatctattcctggcctaatcaaaatatccactaattgatcgtatgggtattctggtgaacaagccagaacaaaagagactacccaaagtgtgctaaatatttctgcactgttggaaagaggaaatgttgtttcataataaggataatctccaagaagaaattaccagcctcttcagctctggattcattatcttaagcctatgacaggtgaagaaacatacattagattgtcagcaactaaaagataaattcccctctgttgtgtgttccaaagtcttttaaaataacagaggtatttccattaaattctttttaaaaaataactgagaactcccctagtgtctatcgattcaaaaaaaaaaaagcatcaattacatccaaaataccgctttctatccattacttggtgcagttgccaaacggaagatttttttccctccgaagtcatttcactcaatcattgggctggaaacaggaaaggggaacattccggcaggcaatccctaaatcccttgagagcatctttacagtgtgccatgccagccttcagtgggatctgatgatatatttctgtgcaatgttcaggcactttttaaaatcccaattgaaattattccatcctagtaggctgctttcgtgatttttacagcatgggcacagaagtcaccagttccatgactaacctcagccctagagcaagcagggaccacatccccttttacaaattcaaaaatacaacaacaacaaaaacacaaaaaacaaacatcttttcagagctcccataaaggtggatgaccatcatccatctaagatttttttaaagtgactcctcacttgcttctcttgtctttaagttctttccctcctcgaggggaaggtaaagaaacagaaggagcaagtcaggatgaatgcaggggatgctctgttggtcccaaattgctatttaaccattttaaaactgaggagcaaaagggaatcctctccaccaaaagggccatttctctttgcttcaccctgcatggaaccctatattggcactttttcttctgaaataaagtgagatcaagtgtctgaagctggggagacagacacaggtttcaagttgtaaatccaaagtgccctcttctctttagagaaggaaggaagtaaactccatctgtgacccacacctccacacactgggtacagtatgaggccaagtgaatgaaattcagtcacgacggctgacctttctggtgtgatatggtttggctctgtgtcctcaaccaaatgttgaattgtaatccccagtgttggaggaggggcctggtggaagatgaatggatgatgggagtggattttccccttgccgttctcatgatagtgagtgaattctcacaagatctggttgtttgaaagtgtgtagcatctctcattttactctctctctctcttctgctggccatgtgaagatgtgcttgcttcccctttgccttcagccatgactgtaagtttcctgaggcttcccaaaccatgcttcctatacaacctgtggaactgcgagtcaattaaacctcttttctttataaattacccagtctcaggtagttctttacagcagtgtaagaacagactaatacatggtgataatatatccaggcagatttataccctaaggaagagtattttcggtaatagtttacatgcattaatcacaaagttgttcattgaaatgcaggaggaggcttaggctcaagtcccagtgatactatctcctagctctggacccttatctaggctacttagcccccaaagtctagaaaatgcaagtatttcacaatactttttggagaatttagtgagacaatacatgtacagtgctttataaacacaaaagaactacaatacctttaaattgttgagagtttttttttaatgaaacagaatacagcaagagtattataaacctggaatcccagcacaagcctataaaggaggactatgatttttttaatttacagggtaaaaaaattaagtctcagcactaatactgatgttgccttttatccccagagatttttatttaattgatctgagatgcaacctgggtattgggactttgtagagctcccagatgcttctaaattggcaatgcaagttgagaatcattgtgttagggagtttcactccttgctcctcccagtgtggaccagcagcacaggaattgcctagaaatgcagagtctcaggcctcactccagatcttctgaatcagaacatgcaaaaatttaacacagcttccaggtgattcatgcgcacaagaaagtttgagaagcatgaaactaagtcacagctaaactgcagaacctgaatttgaatctagagctagtgaattgcaaagctttgttcctaacgatatgtcctccccctctgcagctattaatgtgttcaaatgtccttttaaataactataaacttctcatctgatcttcacagcaacgctgttaggcaaataaagattagtctccatttgatagatgaggaaacacgaagattctgtgtccctgcctaagtcacatagagagtaagacatcaggttttgaaatcaggttttctaaataatcatatgtgattcaatgatgcatttcctttagaatgtttttgtaactttgaaagatctcttccccttaaccctggctggtgtacaatatccttttcttttttctctgggtttttacaacattattccatcccatgctgagttgtagaaggagctgtgctggggaaaattccactatgaaacattctttgccacaaatcacagctgctcatgaggacttccgttgccaacctgccccctaccccagcccccggacttccctaaaacaacattccatctgaaggacacagccaggatggtgccaatcatggctggaaagcaatgcacagaaatcttggagacacgacagaaaagcagtgtggaagcaggtgtgcccaaacattccccataagcctgtgttgaggcgcatccaccaacccagcgaaaaacaaacgggataaaaggtcattgttggaacctgattataagtcccacaggacaatgccatattgtcaggatgccccctcagaacacttccctgctgataacactggtatgcatgtggcttggagaagtcccaggagcaatagagaaggcaacgttggtatgtcagaatattcagcaagctcaatcttgcaaagttcatcataattagggaagtcataaaagcctagagctcgccccagccccctcatccctatagtcaggattttcaccttcagtggaagcctagtagcattttttgtggtttgtcttaaggggtgccagggatacattctactcttcttcccatcttctcatgcccttaatgcacaacagtaatgacaaaaaccagaatccctgttagaacatgaatatccatggaaattatccccataaaatactggggtcagaaaagacctcagaaattatccagattgagtatcttaaagcacagagaagcaaacagacctatggctggcagccttcaaatggccctcaatccttaccccctggatccatgcccttcatagagtctttccacatgaaataaggtggatctgtgtagccaacaggatactgcagaaataatggtgtgtcatgtctgaggtttggtcacaaaagatgttgcagctttgtcttgctctcctgaatcacctgccctggaggaaaccagctgtcatgtcatgaggccacttacagagtggagaggtactgaggcctccaactacagccataggctgcagcaacccacctgtctgccttgggagtgagctcccttggaagcagaacttcccacccacgtcaaaccttcagatgactgaaatttgagatttcatgagagactgtgagccatactgcccagtttagacactcctgaattccttacctacagaaactgtgagatcatacattattattgttgttttacagcactaagtcttggggcaatctgttacctggccataaataacaaattaactgccaaaggggttatgggacatatccaaagaaaaaagctaagaattagctttttcagtgaagttcatattcactgttgtggactacaatggtctccgctgatgcaattggtctctgcctgttggtctgacctctggctcagtatgctccagccacactggccttccacttatttttcatctactacttccttacttcgatttctctcaagggctttgagacttcctttgcactctgctcccaggggttcacatagggggatcctccttgttcagcactcagctcaaaggccacttcagagaggttttctgtggctaccagttctaaggaagctccttctctcagtgccctcctcccaccccctgctgcctgttactgtgcatgaaatcacccagttgatgttctgcatagcatttgacactctctgaaattatttctttttttgcctactcaattattgtctctccccaattgagtacaagtttcatcgaagtaccttgtttttcttattttcttttgtatctctggaagagaaaaaggggcttgctacggcaagatgttgaataacatttggaaggaaaggaatgaagaaggagcctagtacggtggctcatgcctgtaaccccagtgtttgggaggcctaggcgaaggagcacttgaccccagaagtgccaagctgcagtgagctatatgatcatgccactgcactccagcctgggcaacagagcaagaccctgtctctaaaatataaaagaaaggaaggaaagaaagaaggaagggaagaagagagagtgaaagaaagggaaagtttagaaagaaagacacaggtctttgaaatcttttacctacaactttgggaaatacaacctcaacaagcctttgactctctctccctcactaccacttttatgcccagatggaaacaggggcagaagaagggggctgtgatacacagcaaagaaaaggaggtgtttctgagtggtgttccaggctctttcgaatgaaacagaacaaattatattgtttgaatcataaaacatctagagaaaaatttcagtggaatctctgatccacgatgcctcaggggtctgggtctgcagtactccttactctgtttctataatactttccattcacaccaggagggaaagatctggttgggttggatttatttcccatttgagaaagtctgggctcaggaggcttgctcagagaaccaagtctaagaaatgtatctttagggtctaaaccccaaaagggagaggctgcagtaaaaagagctccaaagaatgaagtcatgaaatgtaaagaaaggaaactttgggccaaagatgaaaggccttcttaactgtgaaaatctattagaatatgtaatactctctcaagaatagaagccccattccttacattatttaacacaagggagaacaaagaactggagaacatacgttgatcccacttcagcccctgagaggataggaaaaatgacctaatggtgatttcctatctctaatttacatgataatttgaatctgaaaacattggaaaataatgaacctgactctccgaatagcaggagggcaagtgggccatagtccctggcatctctctgcagctttctgtggagggaggagaacttccgtgcaattccgcagcactccccaagaggctgctggtttgtggctcaaacctagatacagccaggttgcccagaagaggatcacaatatcccagtcccagcacctgaacccaggcaagcctacagcttcctctggcaaagattagaccagtagtgtctaagcaacaagtcttccagaaaggagagggaaaaaaatacaagagaaggcataggacaaatattttcagttttggagctcaaaaggcatatctcaagttctgctaggtgagaaggattccgctactgtttctggggtagagcaagaattgcagatagtatcagaaatacacactgggagattaaacatggccattgaacaattccagattcacagaatctcagacctagaagagacctcagcatttatctaatgtcacttcctccagtttcaaagggagctgtgtgcccagaaaaggagaatgcaatccaggtaagagcctcaaagaggagggtattggaaatacagtattcacctcagcccgcaacagtgaacatggagtttagcgaaggagctggcttcattaagtgtctggaagacagaagacaaagaaagaactggaaatacgggtaaaacctgaacagtgtgagactgtactttgcaaactttcctaatttgtatgcagcctgcatttcactttttctttcatgagagtgaaatgtatgcactttgaaggtttactggctaagttggatgggaaaggagccccgaggaggcaaaatcgtttttgggtgggtgtcagtgaccatgcattttccattttcctacccaaggtgcccaacctggtaggcactacttcatttggtaaaaagtgaacataaaagagaggggtttccatgacctaatattgggacagaaaccatgcctcccagggtgctggaagtagagacttaaaccttttggacagatagaagccgccttatgtctattttggattctctgagggatcaggagcactgtctcagccacttaagaggggagtgacttacgagttcacagccaagtaggataagaacagagattttgctgttgtcaactcctctgcttcggtggaataaataataaggcatgagcttggaggcgttgctgctagttggggagagcaggagaaagcccttgggggctgatgccggcgatggaggtctggttgggctatgcagcggaaacacacaggagcaaaggcttctgtagagggtccttccaggcatctgtgctgccttcacagagctcactccagagctgtgctctttgaggaaaaagaatccctggcttgtgcaggagatctccattctgtggatgctccatttcgagttcagctttggcaaggggggaggggtgtggacgagagtgctccccctcccattgcctggggggattaagaggctctattgtccctggcctgatggcccccgcatttgcatatatcaagtccctggggctgggaatagtggcgcgggctgcacctgctgccctgggttccaagggctgaccccagtgagaccttccaggtaattccatttgtgtcatcacagattcagaaatccaggcttgggagtggaataacgactcgagaagggagcgggagtcatgggtaaacacacacgtcccgggatggctgaaagtggtcagaggtctgggaaaagaacgggctttgaatccttggcgttcttttaaacaggcctttatttggagagccttccaacctcctaagcctcattgaacttgaaaagctacaagcttcctttctttccggagaccctctggcctcttcgcttacctctttcatcgaagccattgttaggggctgcattagtgggaaccaccgatccttcagaggaggcagcagtatcatatcacagatgtaaaaatgatggaacaaaggctctgaacaatccagaggagggtcgagggggccccgtgtcgcgtctgaggggattgacgcctgggcccccgcttctctgcataaataacattttttcagtttacaaattgcttacccatacagaatgtgctttattgctcagaacagcaactatttccagtggacaggtgggaaaactgatacttgccaatgagacattagaggacatagatcagtgatgtggcctggacggaacctcagaattcagacactacgtcccaagatctcccaacagattgcaccacagcaaggaattttaagacaaggttgcgtgaggctttccacttaagcaagaattggcttaagtgttcaatataactacgatggatcatcttggtcggggaatattttagtggcaaatcaaggaaaataagtttttgtgcccccccaagatattgcagagcctggggctcagggcttggcaacagagctgctgataaacagcaccctaagaagcattagcaaatgaatagtttaattgaagtgtgcccagatgaactacagcagggctggcctgagccacatgaggaagcctcaccagctggtctcctgcctatctcatctgcaggctttttccctgccctccataagcccccagcactccacagttcttaacatttgctctccaaaatcaggaattgtcatgacaccaacccctggaggttgttggctaattgacctcattttaatgtcattggactctagcccagtgttggtgctcacagttatttgcattttcacttaaaaaaaaaaaaagattactgtaattacatacagtaaattcactcttttataatgaacaattctatgtgttttgaaaaatgcacgtggttcataaccaccatcacaatcaagatacagaacagctccatcattcttctctgcctaaaattaattctctcattctgccttatggtcaattcaatcccccacctgctggccccatagttttgccttttctagaatgtcataaaaatggagtgatactgcacgttgccttttgagtttggcttctttcacattgcataatggttttgagatttattcattctgttgtgtggattgattggtatttcattcattttcattgctcagtagtattctattgcatgaatgcattatattttgttcagccattcaccgacattttggtttgtttccagtttggagaaattttgaacaaaggtcactacgaacatttgctcacagtttctgggtgtttttattctctcagagaaatgcccaggaatgggattgttcattctctgcttagtgcatgattaacaggtgacagctaatcgcttcccagtccaagcagattttttgtccgtgccattgctgcgtccctatcagcaacacagagttccagttgctctacaacctaatattgtctttttaaaatatatgatatatcacatatgtataaaatatatgatatatcacatatgtataaaatatacatatatcacatatgtataaaatatacatatatcacatatgtataaaatatacatatatcacatatgtataaaatatacatatatcacatatgtataaaatatacatatatcagatatgtataaaatatacatatatcacatatgtataaaatatacatatatcacatatgtataaaatatacatatatcacatatgtataaaatatacatatatcacatatgcataaaatatacatatatcacatatgtataaaatatacatatatcacatatgcataaaatatacatatatcacatatgcataaaatatatgatatatcatatttgcataaaatatgtgatatatcatatatgtataaaatatatgatatatcatatatgttatttgtgtaatatatgatatatgatatatataatgtgtattatatatgtgattatatattacatattttatataaaatacaaatatacatttgtttatatatttatatgaaaatttttatatattatgcatttatatgtgtttatataaataaatatttatatattatatgtaattaatatataataattatatataaatatattatatatatatttagaaatataatgacgtgtgtgtgtgtttacaattgcccttgtaggggcaaagaaggaaagcttcccctttcccccgctgaaggttcatggaaaatgaactgacaaaagcagatccacaagagaaaaaggcagaaacgttgtttaatgtgcatagcgtggagggatagcgggagaatgatcaatcaatagcccagtggggagcagaaacttacatgcccttcttcataggaaaggggagatggggatgtaggagtaaatgatttttaggggaaatgaatgggccaaatgctcagacaatggtaagtaaataattatctttgggaattgaatgggactggagaacaaacagttgtttgggatgaagtttgcctgggttttaattgtggtgtttaacgtttagtcttttccgctatgatatgagttttaatctctgtttagtgaaatttcaaggtaagtattgaagccaatcgtgtttctctttggggggtccagttactaggtagataatggaccttcagagaacaacgtcatcctacgctttgggagagacagagaatcagagagatggagcaggagaaggtcacagggaaaccttggttctcaggctcatacctggggccttttaattttcaaagcactcagcatgccaaagagccatattttggggaattgttttctgtgccgtcaacaccaagaaattctagcaggtatgtagtgatgtctcattatggtttctatttttcagagaaaatatcttgctgtgtcctccagctggagtacagcaatcttagctcacttcagcctcaaactgctgaggtcaaatgatcctcctgcctcagcctcccgagtagctggtactataggtgtgcaccacaacacccaatttcattatggtttcagtttgtatttccctaatgactaatgaggttatgatggcagccgtggcccatctggaggggccactgcgaagacgccagctgcagcaagggaggtgtggctgcagttgtgtgctctgaggggccagcaagaactgggaacaggtggaagccctgccccctaccgagttggcacaggagtcccatgctcctgggcacagctgcagccactcagccatggctccagaattgggcatccctctgctcttggggactcgggaagcccccaccaccaccaccccttgcagtttcggaagggcctgctcccactccctggcctctccctgctcccagcacgtgctctgatttaggagcaaaagttgtggctgagcttggctgcatgtaagcatgttcagggtggcactaacacagcattcccctgctgcctcggccccctctgtacttcaggtgccaacgagcatgggagcaaagtagagagagggctgcgggtggctcagcacaggcttgcaggcacccctcaacgtaagcagcctgggcaccatggacaacatgttgatggtggcaagaggtagataggctcctgggcagaaaggggcaagtacccagtgaagccccaccttcaagccagggatagcctgaagcctgggagccaggctgtcagttttgggtggagtccatggcccagagtgagaatttatgttgctttatctgggcctccccatagccacccatggaccaatcagcaggcacttcctcccttctgagcccataaaaacgccagacccagacagactcaaacagacatcaagactaccagctgtaggaaggagctacccactttaggtctcttcaacttgttgggatgacctgcttgaggaaaggagctacccactgcgggtctcctgaaagctgttctgtcactcaatgaagcacctctctgcctttcttaccctccagttgtccacatacctcattcttcctagacacaggacaagaacttgggacccgccaaatgatgggactgaaatagctgtaacacaacccttgctcaccacattgtgggtgatgagaaggacagaagagctatggacttttggggagcccagatctaggggctccccaagacagggctgtgacacccttttgggggctctgtggttcccggcgtctccaagctcccaggcaccaccacattccccaagtccagatgcaggtgcctgcagcagaagccatgtgtgataaatttggtccagctgcagccttgcatggagccagcacctatgccatggcctggagctgccaaccctgctgcagcagccagagtacctggctgtgcgcaatggctggaccctgtgctcactcgctcacaaccccttgctgctctctgcctggcttgcccttggcaggtttgggatccaggtgtgagccaagcacaccctgctgggctgagtaggtagaacaagctccatggacagcaatactcaggtagaaggtgacaccagccacagatgtttccagctggtgaagtgacaccccagggatcccgtgacagttgcaatttaaactttcaatttctatttatggactagaatcttgttgactagttcaagtaattttaatactcaattgtaggcctcagtgattttcatgtgtttgttggttaagctcaatttttttcagcccctgtaggatcagggtatctcggtgatggcaacacaatctacccaactgaataatttagaaacttagaatcattcatgacacttccttccccagcacatccaaccattaccattgtgcccttataaatctgcccttaagtctgtttactgaactcaggttctatgtcttagttctggtggttggagctgaatcacaggtctaagttcaaggcgaaagttcactaagacttcttagcacccttctggccttttccctagccccacactctcattttggcctgaatagcctctcacatggaagagaaaagcaagaagggaattaaaggtagtccttcttcctcaattaagacctgcttgcttaagcctaccaaccttgccttctgtcattgattttatcatgtcttctttttcttggtaaattactgaacacctgcccaatccaaaatcttgggactatcaatctgtcatttttttctcaatttcctgacttctatccttaaaattttcaaacatacaaaaatgttaatggaatgagacaatgagcatttgtaaaactatgccatatttgctttatctgtcctccttttttcagttgaaccattttaaagtaaattgtaaacaacatgccctttcgcaattaaatacttcagcaggaatctcctgaaaatagacattatcctacatccttcaatatgcttatcctattcaagaaaattaacacgaattctctaacatcaaactggtgttccctttggggaaaggcaaatttccccaaatgcctttatttcagtaatccagagcctagtcagggtttatgcatttggttgttatatctctttggtctattttaatctagaagagtcccctcaaagtaagttttttttttcttttgagatggagtcttgctctgtcactcaagctggagtgcagtggcgcgatctcggctcattgcaacctccacctcccgagttcaagtggttctcctgtctcagcctcctgagtagctgggactacaggcgcatgcctacatgcctgactaatttttgtatttttactagagatggggtttcaccatattggtcaggcttgtctggaactcctcacctcaggtgatccacccaccttggccttccaaagtgctgggattacaggcatgagccaccatgccctgccacagtaagtattttcttactttgccttttgtgatgatggcaagccaatcatcttacagaatgttccaaattctgggtttcttatgttgttttattatggtgccatttagctttgtcctctattttatgaaaaccaaaagttgcatctaaagggttagttaggcacaagttaaagcatgcttgcaagcatcctgcatgggtgatgctctgtatttcataatgcatcacatcaaaaggcatgcaaggcaacatgtcctaccattagtgatgctaaagtttgatcacctgattaaaatgctgtttcccctctttggtacttacctataatctgtgggagtgaattttggcaccatttgaacatcctgttccccatcagccagtcatctaatgattttatcatctattgtttatccttgcctgaaacagttacctcactggaggtttccaaatggtgacttttaaattctattatacttcccatagttattagcttgcgtttttctataaaaacagctttctatcattaacaaactatagttcatcctaaaaagcagggtaactgcttaattctcccctttagttatcaattcttagaataaggatttggtataataatcactgttagtggtggcaagtgagttttcatttattttttctgtctctctcttttcctgtgtcagtaaaaactccttgactttgtgtgtttcaatcgactatggccagtattcttttgatgctcatctgaaactgaatttgaccattgagagcccctcaagctgccttctgcactttttgatatccccccattatctctgagaacttccttattttctggggcaagaagatatcccagactcactttgtactttttctactctagacctggattagcaatttcacagagaagtcttatcttttttcttatggggaatggtatttagaaagcaaaatctaggtgttggggtgttgattattacttgagtgtcattgttcttaggctctttgtgggaattgatataaaatatgtacagatttttaaaaatatcagtgcttgttaatatttcaaattcaaattaaacaatacagttttttcccttaactttaatttcatattactgtaattttttccttacatgaaaaatcttggttgctacaaatattgagctatatacttatttgttttatcctacactatacataagcctactgaaagttataatgctatcaaaagtattgagtggacttgaacatttcttgcagttattattattttcccatttttcttatacatacaaaaaacaataggatgctaaatgtactagcccgcactttgcaggtttttccccattctttctcatgaatggggaaggtctacttatcaatacatatagactttattggtacacatagaccatcctcattctttcttatgactgcctagtaatgagtgcagtaaacacactgtagtttattcagccagtctgtgagttatgagaatttgggttgtctctaatatgttataaaaatcattccgcatgatagtatgtttttaaatttgataggactttccatcctcttcattgctgttcttattgaaggtttccctggctattcttgcttacttacattttttcttttcttttgttttgttttattttgagatggagtctctctctgttgcccaggctggagagtgccatgacacgatctcggctcactgcaacttccgcctcccaggttcaagcaattctcctgcctcagcctcccgagtggctggaattacaggcactcaccatcatgcctggctaatttttgtagttttgtagcgatggggtttcaccatattggccaggctgggcttgaactcctgacctcaggtgatctgcccacttcagcctcccaaactgcttatttacatttttttaaaatacaaacattttctctatctcttggtaggaggtggggggaggtttgtatgtgtgtggaaaatgtcttggtatttgtattggaatcattttaaatatatatttacttggaaggaatcaacatatttataatttggagtcatcctaaccaagaacgcaaaatgtctttctatttgtccaagtctacttttacatcttttggcagagttgtaaaactttcttcacataattttagccaatttctggcaaagattacctctaggaattttatctttgttggtggcttcagctaaagatctctttgctgtccctcagccttgcctatattcaaatcaaacttctgcccagctaaagtgccatctaaagcctccaaagtcaatctgcctaaaactccacgataatggcctcccatctcacttctgtctcccctgctcccttctggcctctgctctatatacctactgagacatcctcaatgtgcagatgcctttagctttgcctagtccagtctttgttaccaccatgcctttccattccatcctcccaatcacatattcactgatatgtgtttatccttcagctttcagtacatcctttggaaagcattcactgacttttccaagactggatcaagtgcctaagcgccccatgtaagactattgtaagatgcccacgctgttggtcactgactgattactcatccatgttcccgctggactgtcagctccccaagggcagggactgtgtcttcctcagagttgaatctgcaggatcagcacagttctcagccaaaccagctcctcatcctatgccatagaaggcatgcacactttgtacttagagccactgctctccctagcctgagcctctaaatgcaggtggatggacctcctgagaaaccgggtgcctgaatttagataaaaagagttcagaggcaggaacaaaaagtattgcctccagagacctttcccatgtggactttgaatgctcatagctacatcccccctttatttctccgatcaacttggatctctatcccttaaaattcacttagcactttatgtactatgggaaagaaagtgggctttgcagtgaagcctggttttgtgtctcatagtgttctgcttaccagagtcttggacaaaacggtaggaaaacagtcttcctctttcaatcaagcaggatgggatgaatctcctctcaatacagcatgcatgcctggctgaggtttacaatgctatttctctattctagttctactaacatttcactgagatttgtgggcataaagatttatggaaaaaaatctaaaaaataaatctccatttagcatagagatggcaagtaagatactttgtttgcctttgctccatcagagttctgctagtgaacacaccacttgcaaagcctgcagcatctcctattttgctttctcacagcagaggaatccacggtcatgccaacctagttctagccctaatggtgttaaaggatcagtggttctcaatcaatggagtgcttcaggatcttccgggctgcttgttaaaatgcaggttgctacaccagccgcacccagaccccactaagttttgaatcaggaggtctggattgagaatgaataatttgcatctctaacaatttcacagtgatgttgatgctgcttatctggggactacactttgagaagctgtattctagagaaagctcaaggttgaagcaccagccccgatcaggaaacagaagctaatgcctcctccttatggacagatgaggggcattttctccctgtccaacattcttatgacatactagagctcctctatctgggaccctgtcaccaagggttcacagcattttcaaagccaagctaagttacatttaaattacaaaatatgcctacgttatttattactttgaggggggtaaaagaagattagaaatgaggcaaggtttcaaaaaccagggaagcaagaatgtgttaaagactttagagttactaggaagcccagtcaaacagaaacagctctaatgaagggtttttttttttttccttcttgatgttttggttaaatttggttatgaaggttataaaaaatgaataagacctgaccccaactctccaggggcacatagaccagctggaaggctgacataagaataaagcagaaggaagtatgctgtgcgagagaggcaggcagaaggctgttagagctcagggaggaaggggctgactcaacccagtgatggcacaggagaaagaactcggctctcattagcgtctttgcttaggactgtatgtgtcctatcacattgaatttaatcctccaaacacctcgtggggtcagttggggtcagttatttgtgaatcttagtgtcagatctttgggtagtttgagtggccctttgacatatgagggtaattgaaagaaagtaatgaaccacttacctggctgaacttgaacttgaatttggagttttattattcttgggaagccttgggatcataccaaaaataaagccatttaatatcttaaatctgcctcaaaggtttgcattgtttgccacgggctaaacatagaacaaaaaacacctccccccagcacagttctaaactgtatctccccccaccaacccctggggaccagcgctggaagcaaacttcacccttagtctgtgggaacgtgtgtgttcttctgtgagcctgtgctgtgttctgacaccccacccacacccactggggtcctaggctttactgaacgcctgtctcccatattcaggcgtcagaaactcagcagacaaacccctcaaatcatattacagtctacaggcaaccagcagaaaacaggattgggggtatgctgagtcagagagagagagagagagaggtgattgctttgtgacctcaaataacagacgagtacaggcaggcaagagacattgccttgcttattttatttctggagtgaccaacagctcagacccctcatcctgaatcaggagcagggaatgctcccccaccatccccgattctgatggagagcaccccaacaacgtccacttcacaaatgagggacatgaggcgccgagatgtgttaggtttttttctagtcacacaggctgtgtgactcggtcactacggcacgctgctcctcaaagaaactgaggtcccccagtgaataagctgtctcccacagctcagagggctcctattgccttggttgttaaatcatttttcccttctcaacaagccacagaaagctctgtcactgtgcccttcaggtctccaaggtgaataattaaataattgtggctgcctaacacctgctatgtctctgaaaaagggttgtgaagcgaacaacttaaattgcttaaatgtatttgcacacacctgcacacacccacatgtacgctcatgcacgtgcacaccattacctgctgggtggatctcgcctctgttccaggtccttcactaagccataacccctgccacatgctccatgttccttcaccttgagtattttttcagcccctcccaggataacctactgaaagcctcctttgtctactcattgcagtcttaccttggtgtttctcttgcatcttgaaggtccttccaggtgtctgccttctgatcgtctacctggtcccttgaagcatcacctcctccaggaagccttcctcccatactcacaggaatgatgtgtctgccctggccctcaccccgtcggggctggtccaaactgaaaactattcatttcttacaatcgccttaggatttgtaccagcccagacttcataaagtcctgtcaccagttagaggaatgaggtgtctcatgtagccctttcagcaggaactccggatttgtcaaaattgaaccattaaaataagatcattaaaaagaaaaaaaaatttcaggtgttgaagcaaaccatttccgaccacagagtcaaatagctgcgcaggtataaatgatgccagatttggttcaaactcatggacattttttattctataggatttttaaaaatccttttttttttttttttaaacactggagtttgggggtggaggggatgagagcaggaggaaaaagcacaggaaatgtaaaggattctggaatttcaaatgtatggggaagacaagtaacttccccaaatctatgcagaaggtagtggctggaagggaaattaaataattaagtggaccacctgcagaaaatggggaccagaggaaaaacactccattggcacaaatagaaaccacacatttctaaaagcttccatcagtggatcgttaagccttctgagccgctagtttcaggtttggatatcttggcaaccattgatgggaagcgtgccaaggcccaggcacccgggctagaagcttactctgcaactcctggcagacacctttactcctacgcgagagatctggtgagtgttaaggaagaaaagtacttgtgtcaaagctaagaaaaccagttgcacttccaaagctaagccgcatgcaaacgctggtttgttttctgagagcctagagcaatttccacaccagtgaaaatatcctggagatgaaggagaaatgaggccgctctgccagccacgtccacccagtaccaaaaattacttgtgctttagagttgattacatggttcccatttgtatttacactttgggatgggtattacccgtaatttacaagacagtcactggacactcagtttaaatcatttcccagataattacaattaataataataataatgcccagtatttatcaaacactttctatgccccagacactatgctaagaacttaatgcacatgatctcattgattagtcacaaaatcatccttgttagtcctaccctcaaagtctggaattcccttcctctgttttcttgcatcacgtgactcacgtcttacttctttggtggtttcctcctctgtttagataaaatccaaagtcttcatcatagcatccaaggcttgccataatcagttcacgatgttgttaagtttagcctaaagctgcctccttacatactttaagttcagcctaaagatttctccataaatagcaaactgtaacctaactggatgtgtacacagaccataaactacttttaaattgtaattatttttagagacgggccttcattatttcacccaggctggaatgcagtggcaccatcatgactcactgcaacctccatctcctgggctcaggtgatcatcccacctcagcctccccagtagctggaactacaggcgctgccattgtgctgggctaatttttttgttcgtttttgtagagatgaggtgtcttatgttgcccaggctggtcttgaactcctgggctcaagttatcctcctgcctaagcctcccaaaatgctgggattccagccggcagccactgcgcggggggctctgtaacctacttttatgattgtgccaatcactgagtttgggccaatcacatgtggccaactgctcaaaccatgttccaataaggcaaatgtggagctgcagccaatcccgctctttctctacctcacttccgttttctgcaaatcactttcccttttctgtccagaaatctaccacgtggctgcactggacccgctctcaacctattcccctttgtgagctgcgtgattcaccaatgattctttccttggttaaactctgtaaaacttaatttggctaaggttcttcttttaacaatgtcaagcactttcctgcctcagggactttgtatttatttgctcttccctctctcctgagacacactcacacacaaacatcacactaattactaattttcactcattctttgtatcttggagtaaatatcacttctccaaaaatcctttgcctggcccttttatctgaatcaagttcctgtcttgtgagctctccaaacaccctgtatttttccttcagagcacgtgtctgtttgtaatcttttacttacttgcttggttttatctttccaatctgttcatctggggcaagggactgggagtcttttgttcaccactgtatgtaacctcattacttggctgtacttggcatatagtaagtgttaaataattatttatcaaacaaataagaacaacattttgaagcagaagctgtcattaacaaactaatttttaactgcacaaagaaaatcagtaaaactatagttctgcaatggtattggtttttatattggtttctggggtgctggtgaatgtttaataagattttaaagaagaaggaaaagagaaagaaagaagctcctatggagcacttgcctatctctgtggtggaaatacttcctctgtgttaggccccagtgtgctgtcagcttgggaagaggtgcatacacatggctcttgagagctgggacaagatggccccagcatatctcaggtctagaaaacctgatcaattacatcattcactgggaggtagagaatttcatttaagaaattgagttcctgtttttcacacatttgctttgagttgactacattaccatttctgctgcaagttagaccagaacttctcacctgcagcccatggtgagggctctgtgtgggtgagacatgcatcccttcagcccatggggtggcgttagactccaggctggtcctctctggccaaagtgcacttacctgagcacatacacatgtttttgttttttatgtgtgtgagaacatggaaggaggttgcaaagcaaaataaatgaggtgggcagagggggaagcagtattccaggtaaccaggcttcctccagctcttcttcttttatgctagtgggcaaagagaggggagaatgggcccactgtgttttagaggctgctccccaggcctctatttgcgtgctgcctacatgcctccagtcatttctatccccccaaacaaccacaaccctgctcaagctggcacataaacttgcatcgtgtttccaagaaacagctgagaaggcttggaaagggctccctcctctctcatgagggttagggatagagaccatttccattttacagacaagaacgttaacacatagagagattacattattcaagcaaacatacatcttggcttagtggcggatccaggggttgagtatgttactgtgttactgtttcttaatcttcttgcccaaggcacagatcactaaatatttcatatagcactccccacctcaccaaactagcagaataaagcaaaatcttccaaaccctcacagacttttctttttctaccttttgtcccatatgaaaatcaagctaggcatggtggcttatgtctgtaatcccagctactcaggaggctgaggcaggaggatggcttgagcccaggaggttggggctgccttgagctgtgatcacaccactgcactccagcctgggtgacagagtgagaacctgtctctaacacacacacacacacacacaccccctagatgtttttctgttacctgtaaactctctagcaaagaaaatatatcctgtgcttctgcttatttcacatccccatagaacagaaaagatattctaaaatggtaggtatttgttgatagactcatggagtcattaataagataatttatattcacatttactcactgagtcattaataagataatttatattgacatttatgtatttattatcacaataaaatgactttaacgctacttaacccctctttacactttgttaaaaatattatttccacatcagccttttttttggaattttctttttcccaaaacatgtattgaataaacacacacacacacatacacagagagagagaaagccacaaaaatataaacacaaatagcttagtgaattactaaaaggttaacatccctgtaaaacatcacccaagtctaaagacagatttgccagccccccaccccaaccacccccaagctactgcatgagcaccttccactcctggccccctgcctccctataaaagaaatcactatcttcatcttatagaacacatttcatcacatttccttatggaaaagtgtgtcccgacactagaatttagttttccccattgcaaacatacacacacaccaaccattggtcactttcgtttacttaaaatttatctgccgaagaagccctttaacctgaatgtctcatggtctgcactttgctgagggcacactcctggtgtgttcaccacgttcctgtactgcccggatctccggcacatcagtagctccatccaaaggtttgctggaactcaggctccatctcttcggcagtaggaaagtctccaagaagaaaaggaatttgggaatagggcgtatgactgaactattgtgaaaactaacgaggacatgataaaggcaaacaaatggagaaaaaagtaggcgattagatcctctggaaaacacaacaaagaacgcacacacacaaaaaccaaaccgaccaaaaggccatgatccaacaacagtgaaacaaacttaaatgtggtatgatttttaagcaattgatggaatctaagataaaagagctcattggactttaggaatattccatttttagtgggccaggaattatgactctgggcttattgaaatggaaacacaatcccatgtgattttatatatttacctaacttctgccaactctgcttttacggtgtcaagattgttaacatttaccttctctcctgcagtctccacatgcttttgcataaagcacggaaagcttcattgaggttgtaggcgcaaaggtaaatgttaacaaccttgaaacagtgagagtaaaagtggaattgacagaaagtggataatgggagtgtgggtaaggaaggtgggggaactcgcctcactttactaagtagggtgttcatgtacactgtctaaagttgatttcttgagaaatagagaaatgtttgaatatattattttaaaatagaatgtagcccatatgagaaccaaatattaaaattcacatgtcaaatattgaagaatgaggatggtattacaagtgactaaatattcatctcacatgagggagtctgtggatattgtcaaaatattttaatcgacaaacgagagatacacgcattcaatttgaagttttgaagacattaagaaccgaaggagtaaataaaattcgtccctgcagagtaggacatagaaggaggaatgaggtccttggcttctatcacagaagattctgtgctgcttaactgttattatcttagtttgggtccccctagaagtaaaccttgaaccaggatttggaggcacgctgtctattgagtggtgcagggcacagctgtcagggaggagaggaaatgatataatgcaggatgagaaccagaaagactcggttattaaaccagcacaccacagcaaacaaggaaaattcattccaaagagaaaccggaaaacatcttatacataccccccactgagaagcaagggagctgggggctatttctatgccaatccctatcagctgttagctgagggtgactcccagagtgttgttaatttcccagcaactgtggcccacgattctaggacagcctgcagtggttctaggaagaatgcgctcaggcgcagagatggggatggtgccagtcagcagtgttggggaccacatggaaatggtgtggatgcatagatattgggtggggcacggacagcatctgctacaactaccctgtgtgcatattaatcttagggggacacagggaaaacttccccatcaccctctgaaggtttgctgaaaattactgataaaaggcaaattaataggagaaaaagaacacaaatttatttatttatttatttatttatttatttatttattttatttatttatttttgagacggagtctcgctccgtcaccaggctggagtgcagtggcgcaatctcggctcactgcaacctccgcttcccaggttcaagcaattctcctgcctcagcctcccgagtagctgagattacaggcacgtgccaccacacccagctaatttttctatttttagtagagacggggtttcaccatgttggtcaggctggtctcgatctcatgacctcgtgatccacccgcctcggcctcccaaagtgctgggattacaggcatgagccactgtgcccagcctagcacacgagcacacgaatttatttgatcacagttttatgtgacagatggaactgtccatttttattcttaggctcaacaaagtatggacaaccgtatagaaattggccgggcacggtggctcacgcctataatcccagcactttgagaggccgaggcgggcagatcacctgaggtcaggagtttgagatcagcctggccaatatggcgaaaccctatctctactaaaaatacaaaaattagccgggcatggtggcatgtgcctgtagttcagctacttgggaggctgagacaggataatcacttgaacccagaaggtggaggttgcagtgagctgagattgcggcattgcactccagcctgggcaacagagtgagactccatctaaaacaaaaaaaaaaagaaaagaaaagaaaagaaataggattggaccaaaaggtatgatctaatgctcatagattgaatggggaaaccccacaaggtctgtctgtgtaaattcttcttggcctttctgagcatgccttccttctggatacgagacagatccctctctggaatggggctcttatggcccctagtcaaacatgatgggtcagataatttctttatggccagtttttacatagaaaagcagatggaaagttagaataataattttaggttttatggctgtatttggggaaaaagcattctgaactgtgagctgccttggagaagaaggattctagtttctactgttaacctccgggaagaatgaagagccagagacaggtgggtaggagaaggtcagagaaaaacttcagcttctgaggcctcattttaggtatcatttcctgagcccagaccctttgatacaaaaacaattaaaaagaagtaacgaaatgtattgtaaaatttcttgtgtatccatgcaaagaagtgaacatttattgtgcattgttgttgttgttttattttattattattatacttgataagttttagggtacatgtgcacaatgtgcaggttagttacatatgtatacatgtgccatgcttgtgtgctgcacccattaactcgtcctttagcattaggtatatctcctaatgctatccctcccccctccccccaccccacaacagtccccagaatgtgatgttccccttcctgtgtccatgtgttctcattgttcagttcccacctatgagtgagaacatgcagtgtttggttttttgtccttgcgatagtttactgagaatgatgatttccaatttcatccatgtccctacaaaggacatgaactcatcattttttatggctgcatagtattccatggtgtatatgtgcacattgtttatgtaccagaaatcatgccaaaccggatcatttatattgtctcaattcttattacaactatgttgtgtctattgttatctatttcagataaggtaaaggtggctcatagaatcttagtattactaggaacttcagtttctaagttaattcatcatatgtaaaaataaacaaatattgaattggaatgacaccaaaattgactgtaaatttctaatgcagaaaatcctaagaacgatgaaataggatagtgagacttacaggaggataaaaagatgatcgttttacttgggaagatgctgagtgggaggatggaagggtattcatcagatgtcctgccagcagctgtgaatagggagctgtgatgggtgaagggtcttgtctataacatcattcataggctgttccctctgcctggagtgctttactcccacatctttattttcctgcgtggctcattcttcacagcattcagacctgtttaaaaccctcctccttggaaagatcttccataaccatgtcaactagaagaacacatcccagccccacatttccacactgtcccaggccccattaatacctggcatctacctctggtggccaatttgagaggagcgctgatcttccgtgcatgaaaaagccagcctgaggaaaccagggaacaaatgcactatcttctttcttgctccaaccttccgtctctccagtttcccactggctgtgtccattcagaaggcaatgcacaggggacttcattgatgcagcccatacaggtcaggctcttgggtagaaattagagtggagaagggtagagaatagatgggaaggggtgtgatggattgctttaagaatagtcctaattctccacctctctctatattcataatctaggcaatttgattttatagctccacccatcacaaagttgaatctattttattattccttgaatctgagctaatctttgacttgctttgaccaacagaaaatgatggaagcgatattgtgccatttccaagcccaagccttaatgaaactgtccacattcccacattctctcttggaacactgcctaggactttgagaactagccttgataatcgactaccagatgagagaccatgataagcaaagataagctctctaatttgaggccatcacagactagccagtcctcaatcaacacaacaaccgactgtagtgcatgagtgagtccagccatgactagaagagctgccctgctgagcccagctcaaactgctgaccctcagaattatgtgctaaataaatatttattgctttaaatcactggtttgagggatgagttgctattctgcattatggtactagatgactaatatggagcactgacacagtcctcaaagaatatttgttaagcagaatgaatggcttttctttatttctttatttcctatctttacataatttggcaaaatttgctttcaccaaaccaatatacacatattatgctttacaatatccataactgtttttgtggatatttggaacctatatcacatttcaattgttgcagtgggcttcccccacttagaagaagacattgctttggggtgttagggcaacttaagttcatttttattctccctctatacttatgattaaggtgattcctgaagttctgaaaattaacatattttctgaagatgataaataagaagagctaaaggtcaggaaatgaaacttgaggcatgtccatgctagctatgtacagagagcagaggaagggataaccaagaaagagagactgaaggcagtctttgagttacccggtgactgggccaaggtaaaactgcttgtggatgtcatttgtctctatagtttctaggggctcaaagcatctagagtcatgaatatatttagactgagagaccaaagcaggacagtttgagggaaagcaggaaacccattgcccctcttatctacaccaagtctctgtatgataaagagctccaagctcacacttttctcttggtctggactttgggtcttcacatcatcataggtcaatttcttccaggtctggagaaagagactgcatcggaaacaagacaaaaagtctgggtgaaaaatgaacacatttagtcaatcactaaattgctaggtatattagtctgttattacatttctctaaagaactacctgagactgcataatttataaagaaaagaagtttaagcggctcatggttcctcaggctgttcaggaagcatggctgccgggagcctcaggaaacttacaatcatggcggaaagtgaaggggaaacaggcacatcctacgtggctggagcagaaaggagagaactgggaggtgctacgcacttttaaataaccagatctctagagagctcactcactttcatgagaacagcaaggggaaagggtgcccccatgatccaatcacctcctacctggcccctcctccaacattggggattacaatttgacatgagatttgggcaggggcacaagttgaaaccatttcaccaggcctccatgccaaactgctcagtgctgaggagcatctaagtaatcaatcattgtacacttttcatctagaaatgctggtagatgtagcactgaccaaagacatcgagaggctgcagatcaattcaccattacagctttgggaagcccaaccccatgaggtctatgaccacatgaagtccattctagaagggtagatttgaaaaggaactcatatgcaatctagggtaactcttttattttgtagataaagaagctgaggtccagagaaggggtgttacttggctaagtccacacagctacttgatgacttaccctggtttagacactagccctctggactcctatatactttgttccatttctccattttctcctttatttagaggcaaaagaaaactttccaacttatgcctcaaccaaaaataaatgagtaaaaacccctcaaataggtaaggtcatttgtacaacactttatggcttattctgtgcttcaccaaatgctttttggagcatcgcaatacttggagcagacagcagctaattgtatgcttacttacagatgaaattacatgatggtcctgcaatcggaaaatgacaaagctggcattggaaaccagatcttttccttgcatttctttttttcttttcttttgtatcgctcattttttagagattgtgtcacccagggtgacttgcttgctctgtcgcccaagctggagtgcagtggtgccatcttagctcactgcagcctctaactcctgggctcaggagatcctcctgcctcagcttcccaagtagctgagactacaggcacacaccaccatacctggctaattttttgtttttttatagagacggggtcttgctatgtaggcccaggctggtttcaagcagtcttcctgcctcagcctcccaaagtgttgggattacaggcgtgagccactgtgcctggcctgcatttatttttgcaaatatttattgagtgcccacttcacacaccccagatactatgctgggagcacatttgcatccatatatattaatgccagttataggataaattgcctgtgtattggtcagctttggctagatcatgctgcaataacaaacaatttcagatacctgtggcttataatacaaagattttattttgactcatgctacgtgccctggctctgctacctgtccttatcatctcattccaggatccaggctaatgaagtaaccaagaacaatatgtcctagccattataactcttcttagaggcctgagttttggaggaaggaggaagcaagaataaggaaagggtgccccagagatagaaagggaagccattgtaagagctctgcaaagatgatttcattagttacaattgtaggaacagaaaaatgactggtttgcatttcaaacaaggggaaaaagaagcattgttttgtgtgtgagtgtgagccggctgggtattggattctgaattctttgttatatcctctggcaagaattcagctggcctcttacttcttcctgtcaaaccctgaaatggactacagcctttgaactaaaatgctgcacacccaacccaaaactcagacagctctgaaagtgttcactgctcagcagccgattttaaaccactcttgcccttggcgactttaaatcatctccccaccatcaccctggaacacattagacaactttattgccacattccttgccaatttaatttttgtaaaccatattccagcactttagatttcctcatgtaacagagaggtttttcaagtgagactttgaatccaagagtggattcccgggtctgtggggatcaccgcactccattcttaaaagggagcaggagtaattgttagctgacgtccctggcatgttttggtatctttggatactgctctaattatgactgttatgataacatgacatgggtgattccgtggaatctgaaatattgcatgtccaatgtcagcccaaatgagaaccaggaagctggcagagagggaccaagtcaggatggatttgctgactctgttatggcgttaacatcacctgagtggatttatccaaattcagagtaaatgttccataaaaaccgcttaaaacttttatttcaaaatggctttttaaattaaattttaaaagtaacaataaatatgataagtacagaatatggaaaatgataaatacagataaatcacaataaaaaagaaaaaaatgaatcttattatccagttaaccactgtggccttttggcataagtaccttaagtcagttactttatctgtgtgtatgtgcatttatatatttctttttaaaacacaattagaattttattcatgccaataaggatccttattcaaaacaactttttatgactgccgtatagatgaattgatcaattctctattgtaatgcatttatgttcaatccagtttttccctatgataagcaacaatgcaatgaatacttttgataaatatttcccaatcacccatcggaatagtaaaagaaatgtttgcgcactcctagcccacactgtagtgtcttctattttattcagtttattaatttgatctttgaaaaagaatttttaaaatttactttcatttgatgaagctgaaccttttcacacttttgtgttttctcttttttttctttttttgtaaattttctgtttgtgtctgcccattttattacaggggccactcctattttcatagcgatttttaagaactctgcaaaagttgatgaacagcaccttgactgagtagagaattcttggggcacatcatatttccttcaaaactgttgaccttgcctcccaggcctttggtgtataaagttgtaaatattgtaaatagactactttttgtcttattggtgacatgcttaccctgcttcagttattttcagccagggatgatgttgccctgcaggggacatttttggctgtcacaacttggggatgctactggcatctagtgggtagagttcaggaatgctgctaagcatcctacaatgcacagaacaggcccctcccacagcagggaattatctgctccaaaatgtcaacagtgctgaggttgagaaaccctaatctaaatgcttggacaattcattcttaaataagttcaccaagatatgtcttgattttagtcatttttaaataatttgcctgttgcatgttagggactatcaacaatttttcagaaaaattcctgctatctagctgcctttatgtgtttttaaaattttcctctgccttctggctaacatcctctacataattccatttgttatgccatcttaatttatgttctctactatttctttccttttcataggggctttgtctcctaccattgttttcttagcactatcagttttctcttcacctttgtagagtgcttgcccattaattttaattatattgaaaagtaaagcatttactcttctaacctgtcttgtagttgcagaaatatgtctttttagaagtgttctcttcgtcttctttttactgcttatgtttcttttcttttttttttgttgtgttagaaaattttgtacaaatcctatgttgtgtttccttttttggttgttgttttggttcacttattttagaatggatactaatctatccagtcttcctatttatcataaaaagtgtgggtagatttactttgggtttccttcttatttacctgggctctctttgaatatcctccatggaggacacagagtgaaggctggttcaagtttatataattagccagaatttcaggagcctggaggtgggaagaggggtcacagaagctaagtaactttgccattgaacactttttcttctatattttatgtaaccatgttataaggtaccatctctaccaagttggagaagtagcctttccctttgagaggatgtcccagtggcacaagattgatcatcagctttgaaatgacacaggcttattgcttacagaataatagaaaccttactagcaatgtgttatttggaaaatgcagtcatatatttgtctgtttcttctgaggctgctggtctacagaaaagctacaagtgaattggaaactctgttgatccaaaagcctactcttcctaagccagatttaagagtttccaactaaaattaatctgttaatccaactatattgtttttaaaaagatcccaatgcacagcctcaatggaaaacaatatggtggtttctcaaaaattaaaaatagaattatcatatcatccagtaattttaatcctgggtatacactccaaataattaaaagcaaaaactttaacagatatttgcacactcatgttcacaaaagcattattcacaatgcaaaaaaggtggaagcaacccaagtgtccatcaatggataaacagctaaacaaaatgtggttcatcatacaatggaatgttactcagccttaaaaaggaaggaaattatggtacatgctataacatggataaaccttcaggacatcatgctaagtgaaataaaccagttataaaaggatagctactatgtgattccacttacatgaagtacctagagtggccaaattcatagagacttaaagtagaatggtggttgccaaggggacatcaggagattcttgtcaatagttgctaataggtatagagtttcagcttggaaagataaaaaagtgccagagagagatggtgatgatggttgcacaatataaatatacttaacgccactaaactgtacacttaaagtggttaaaatggtaaattttgtgttatgtatatattatcaaaattaaaaaaattttaaatttctaagcaaagaaagaaagaccctgagtggaaggatgtataaggttataagagattgtgtctcatctaataacctagacaagccagataaactactggtcatagagggtttcttcctggagccaataaaatagctgagaaagttaggcgaactaaacttcagaaaatctgttcataaacttcaggcataagagcatggctgctcttatgcctgtcagaccacagataggagaaggaatgcaccgtgaaagagagtagggagaatctgactgaagagtgtaaatacttttggcaggaatatgtaggacagcatgatgaattagagctctgaggagccctagacacagagcatatctgtgcccacaggtgaaatctgtttcatgtgctgggctatgaaacacatctcatatggagtatattatctgatcacaatggtattaaattagaaatcagggcaaggcacggtggctgacatctggaatcccaacatgttaggagactgaggcagttggatctcttgagcccaggagtctgagacaagcctgggcaacatggtgaaacccatctctacaaaaaattcaaaaacattagccaggcatggtggcatgcatctgtagtcccagctactcaggcagctgaggtgggaggattgcttgagcccaggaggtggaagtagctgtgagctcagatcatgtcactgcactgaagcctgggtgacagagtgaggccctgtctcaaaaaataaaataaaataaattagaaatcaataacaaaaatacccccagtccaaaatatttataaattaagcaacacgtttctaaatagctgaagagtctaagaaaacattgcagaattacttgaaaatattttacactgaatgataatcaaaacacatcatgtttgtgaaatgcagctaagttagtagttgcaaggaaatttgatagttttaaatacttgtattagaaaagaaggtataaaataatctaagtttccatttcattaatctgtacaaagagaaaactaaacctaaagtaaaaggaaggaaatgatttttttaaataataatgatcaataaagcagaaaataagcagcatagaaaataaagttaaaagttaattttttgaaaaaataatgaaaagaataaatcttcagatacattaataaataataaaaaaatacaaattaccaagatcaagaaggaatgaggagatactactacagaccctacatacactaaaaagaaaattatggtacattataaacatagttatgtcaatgaactgaacaactttgacaaaattgacaaattccctggtaaaacatatggaactgacatgcaaagatgcagaaaacctaaataactccatatctattaaaaaactgaatttgtgataataggaaaaaaaatcttcctaccaaagaaactgcaggtttagatatactcactggtgaatgttatcaaattcttaaggaagggataacaccaactatatgcaaactgttttggaaaatggaggaggagagtaacttcaaaattcactttactagggcagcattagcccgatataaaaacctggcaaagatgttgccagaaaaggcaattagagattaaatccttcatacacatagattaaacatgccccaacaaaatattagccaatataatttagcaacatatcaaaatagtaacacattatatacaattagggattaatttcaggaatgcatagtggtttcaaagtttaaaaattgatctatgtaatttaccacatgaacagaataaagaaataaaacatcacctctttagacacagaaattgcatttgacaagatgcaacactcattaacaattttttaaaaataatttgagaaaagtgggaataaaataaaatttactcaatttgataaataacatcaatgaaaaacctacagttaacataatacttaattgtgaaatattaagcccttttttcctcagaccaaaaaaaaaaaggtaataatgttcattatccttactattcaccagtataatggacattctagtcagtgcaaaaaggtggaggaattaaaaagaaagttcagaaaggttagaaaggaaaacatcaaatgtcttttttaccagaataacattattatatgtgctgaaaacactgtagaacctacaaataaatctactataactaataagtaaatttagtaaggccaaagtctataaagccaatgtatgaaaaataaattgtgtatctttattttaacaacaaaattaatcttaaaatgccattaaaccagtgaatacaagggaatacatcttacaatagagatctaatataactataggtaaaattacaaagcattactgaaaagaaaagtaaagatacactaaatcaatgtaaacagatattatcttcacagactggaagaaagcagtgttaagatattttttctcccaaatggggagaatctctaccaaaatcccatgactcttaagctttatatggaaattcaagggatctagaatgtcctaaaaaactggaggatgtacactacctgatttcaagacttgaaattgtctaaataaagttgtctatctttatgctcacaccatactgtcttgactttgaaggtaagtagtcaagacagtatggtatgagcataaagacagacaactaaagcaacagaacagattgagcccagaaacagaatcacacatatggtcaattgctttttggctaaggggctaggtcaattcaatggcaaataggacacctttttaaataaattatgctggagcaactagataaaggtatgaggacaaaaagcttaaccattccatacacaaaacttaatgtgaagtggatcatagtcacctcaactcaagcacaaaagtcagaaatataaaacttctagaagaaaacagaataccttagtgaccttggggtagaaaaaaaaatctcttggacaggatacaaaaggtactatccataaaggaatagaatggtacatttaactttatcataattcaagatttctgctcatctgcttttatcttccttagctttagttcaacttttattgtatttggaaaaatgtccttgtggtatattgttaccaccctgccctgattccccatcccttcactccaccccaactttgtttttcttgatccttttggtcatgataaggagaactgtactagtatttttacttaaattgtcttctggcttttgtgccccctatattccttcagtcacttagggaaatggcttggagtgttcagcctgagtccattttgtgccctccttctcagttcctggatatgatgataaatttgtaccaattcataccccaccacaatcagcttcattggtaaaggttttccttggagaaccctattaaatgccagtggctatttcatttgacacctctgacagtcctaaaatgtttgtttggaaaagcatgtgacaagtatagtacatagcaaagagtggaaagaaaagtaataaagataattaagtgactctgagtattgttttatgaaggatgattgaagatattaatacaaaccacatttctttctggaacacccagtgaaagagggggattgatgaggcaataactgctaatagaataaacagccaaaggagaaagacatctgtgggtggtatcaagggtataactccaagtttcaggaggaatttaataaagaaatgtttaggctgagaaagttccagttagtgggaggcctggagcatggcaggctgcatctaaagacatgggttcctgtcacaggcctgagattgtggaatcaaatgaagcctaaggatgcttataatagagcatcacacagagaccaagcgtgtgtgatgggttctctcagtctttctttcactttgctttttattcagtggctatgaataccaaagacaagtggtaatggcggttttctgatccacacaaacaatggctgtgtttttgtgttaaaaaaaaaaaatcagtaggagaatcccttgaacctgggaggtggaagttgcagtgagcagagatcgcaccactgcactccagctgggcgacagtgagagactccgtctcaaaaacaaaacaaaacaacaacaacaacaaatatatatatatatatgagtcatctagaagaaggaaaatcaattagttttctagtataaaaaagactaaactggaaaataatcatatatatatatataacagatataacagattattatatgtacataatatgatactttatatcagtaaataacagattcaggcctagtgtctcttgcattaagaagataagcctcaaaaaacattttaatgaaaaacagaaggctgcggttacctctatgggtaaaccagaatgttattcagacagagatgaccaggccttcctttgccccatggaaaggggctcaggtgaactctgccagtcatgggacccacgcgaggacaggttgatgggaaatcttgaactcaaatggaacctgtgcttgagtcgtgctctggcttctgttgcctgaatttcctgtctttccactatttgtccactaggattgtgaggtttgtgagtgcaaggttcatgtctttcatttctgtatttccagtgcgaggcatgaagtcagcaaggtgtctaaaatacatctgatacatgtgcccttcttgaccgccatggccgccatcctggccaaccactgccgtctcttctctggatggcaatgtcaaatagcgtgaccaatgatcacttttctatgcctgccttctatgatatgttcttcgcagggaagccagaatgaaccagcctctttggccaatttaatctacgtattacttcctttgtatcttgtatgttcctgcctctttgcttttcctctcgtttggagtaccttcccctgacccttcttttcttcaagcccccatgcagatccttctttcatctctgtagcttttattaatttaggcatctcattaattgagtcattcaataagttatttaccatttatgagcatctactgcatgccacacatcgtgttaatttctggagatatgaatataaataggatgaggccctgccttctgggaacataacctaatactgggatgtaccaatggtccacaaacttggctaattcacagccccacctgaatacttaaaaaaaaattacagatactcagtgtgtccgtcctcaggctgtttcgctcacatttcctctgcttcgttctgtattgcagagaggttgtcagctggaaaataggaagagggaaatttggaggaaggaggaagggattaagcaggtgtttctcccgtccccctgactttggtgtcacctccagcagtaaccatgatagtggtgaggtttcagcttcctctgaacaggccagagggggatgcctctatgggtaaaccagaatgttattcagacaggtatgaccagcccttcctttgccccatggaaagtccttggatgccagtcctactacttcattgctgtgtcccttcagcctcggatgatagtggcttcctgttcttactactgcttaggtgactttactgttttctatttgatttagctcttccaacacttgtgcaacaaccttcctatcttagatttcctttgttttaaatattcagagtggttcccaccttcctggttggatactagcacagttggatactactacagttattggtaccagaattggccccaataaatcagatattcaggatgcagcgctcacgtctttgagtgtggtggtttccttgcagaattgtggggaactatgaatgtcccatagcatatggtagagtcacaattatttaaatgtgttatctgcgcttgcttgggatgaagtgtctcacccgtcatggtgttctgtccttccactctaaccctcaaatgcttctgcccaaggaacacattccactgagagaggagtgcagaaaagggttcttcttatgctcaccatcacccggaagcagctggccgcatccatttagaactgcttgcaggatactctctgttccagttacaaaggtgttgcctctcctctccaaatttactcttcattccctgctttcttttttgttgattttttttgttgatacataatagatgtgcatattttgggggtacatgtgttaatttgatacattcatgtgatgtgtaaaaatcaaatcagagtaattgagatatccatcaccttaaatattcatcttttctttatgctaggaacattcgaattatttttttctagctattttgaaaggtacccgcttttctttttcctttggtagctggcttgtcaatggagtgtactggggagacagtgcaggaagaagggtctttgtcggttctagcgtcttctcttagcagtgcatgcagctcccagtgctcgacttgaacagtgtgagcggcagcccgggaaccaggttccctgccatgcacagcagcagccgcggggccagcaacttccctcgacctgccccttgaaaagcgccccctgctgtcttagaaagaggatatctggcaaattctggagaggaggtttccagcaagttctgccggcgcagcactacaaactcttctctgccattcagggagccacggtctttccttccccaatgtgatctgaggctaagctctagggtagatgcgggtcttgtccttggttgctctatctcatccctaggggtagaggatattccttatatgttctattcctatttagagttctcatcacctccttccagacaatccctcattcctccaactccgcgtcatagttaataattctttgtagccaacttgccctggtcaaatgattgaatcatttgtcccctggtgagatcctaattgagactctctattatggtgccagctattaaacaacaacagtctccagtctcctgagacaccggagcactgccctgcaagatgtatcatacgtttactatgattttttaaatttttaagactttattttttagagtagttttagtttcacaggaaaattgaagacaagatacagattttacatatactccttattttcccatttccaacatcccccagcagaggatgcatttattacaatcaataatcctacattcacccatcgttatcacccaaagtccgtaatttacatgtggttcactcttggtgttgtacattctgtgggtttaaacaaatgtatgataacatatacccgccataatagtgtcatcaagtattttcactgctctaaacgtcctctctgctctgcctcttcatccctcactccctacactccctggcaaccacggatctttttactgcctccacagttttgtggcatacaatttgaaacagcaatcaatacatggtgccatttttccaacagccaaaataatgagtccaggaaccaaaaggttgaagtcatgattacacttagtaacccacccacaggtactgtacttttgattcctgtggactcttccagtctaaagttctgatttcataatggaggactgcttccattggtgacagagaaaggcccccatcagattagcagctgagacgatttgggcctcctcgtgccactgaactgacagaagtgggttctgggtgcattgtgtggatttccttaatgggggtagtagcttccaactggtgctaatttttggattgcctcatagtctcatatatgcctcctcagcactgctatcaggatttggtagataaatcttctttattgaaacaggttgaatggcttttgtttgcttgattgaaccttgtcaaataaacaggcgtcattaaactcgtatctctccctgcttctgccactctctatccctcttccttgctgtatttctccatatcacttactcattttcacactcatagcttactcatgtaagcttactcattttcacactcatttagtcatttatttatgtttcacaaaggcaggatgtaggtacattttatgtttttacttctgtatagctaatgcctagaaccaggcctggtatatggtaagttctcggtaaacattgttaagtgaatagatcaaaatgggtatagatttcgaagtgtacgtgcgtggtgactaaccctccaaattaacccatcaattcaatgcaattcaaatcaaatttcaaatatagtctttcactaaaattaagaagctaagatttgtatgaaagaataaagaaacacaaccagtaaagcatttagaaaatgtgggggagaggacttgccttttcatttattgagatttatcataaaaccatattaataaagtatggtaataacttaggaatagataaaacagtgggttacaatagagatctccaaaacagacaaacccacacatgaaatgtgataaaaggtggaggtggtacagcaaattgctgaggaaacaataaactattcaataagcagcacacccaaaaaaggctatttctaaagaagaaaatgaaattagttctctactccacaccatccaaaaagttaaattacaattgaatagataagcaaaatatgaaaatctaaactatacaacttttagaaagaaatgcaagagaatatcattatgacttcagatagggcaaggatttcttaacagtgaaaaataacacacaccatgaaaggatacatttttatgtttgattcaatgtaaattaaaatcttttcataagataatgggcaaaaaatataatgtgaacaaatttatggtgtttacagattgggctaatttatattgtttatagattgcctatctcatagaactattaggattaaatgagtttctgccttttaagagcatgtaacgacatcatggatactatagctgctattattattaccactccgacttactatcacatttgccagcttcatttaggcttctaagcatgctttagaggaaaaaagtcatataatggaaatagggatattacaaattcaggggacccaaaatattataataatattaaaatttgtataataatagtaaacccaatagttcaacctacatggctgacaaagatatagtgtccaggaaatatattttttaattctacaaattaataaaaatagaaacaatctaaaaaatagacatttaatagaagaggaaacctattgacaaataaacatatgaatcagataataatgttgctttcatgcaggagaatggaaatgaaaacaaacaaaggtgatgtaacgtttcacactcaaaagaatgacaaaaattaaaaattggaaattctaaatggacaagaatatgggaaaacgtaaactctaatgtcttgctaattgaagtacataaatgtataaaactatttgaagaacaatttggcaacatctattaagactaaagctgcctaatccctgagactcagtaattgtactaaaaaactctagagcagattcacgtggagataaaagaatattcatggcagtgttgcctgttaaagcaaaaaaaaaggtgaaaagacctaaatatgcatcaatggaagatttgataaattgtgctatatccacagaacactttaaagcggttgaaatgaatgaaccagaccttgatgtagcaagcagatcaaatcctgtatagcgtggaacaaagaaaccaatttgtgggaggatatatacaagacggcgttcttgcacctattttaaatttatacacaacagtagaatctattgtttgtggagatttacatacacgagaagaagaatggcattctggtgaaggagggatgggaaatgatacaggagagaagtacaacggtgacctcaactttataacattttatttcttaaaagtaataacatgaaacaaatgtgacaaaatgttgacacttgttaaatttgagtatttggtgtatttgtgcttgttatgttactcttttttagaaataaatatattactttccattttttcctgaagatgtcaatctaatactcatatctctataaaattttaaatgccttctagcacctcttttttgtctacgtctcattccttctctatcctcattaggatgcaatattcatgtggctgccaagtgagtcaagaaagttgggaaaaaaaatcaacaaatgttaatgtgtctctgaaaaaacttgcagtgatgttgtgctagcacgcactttccacaaaagaccgattattgttaagtactttaatcataatgtaaatgtataggcatgctactaaacaaaggttaaaggaatacatgcacgtaaatacacattagcaccttcttttacaatgctttaactcttcttggattgtgttttatctaactatggtgttctcgctctcataaatgtaaaaccaggactgttctgttttgttttgtttgttcagttttaggtcacgggtttgtttgattttgtgcaggtttgttatataaggtaaattgcatgccacagggttttggtgtacagagtatttcatccttccaccttccactctcaagtaggcctggtgtctgttgttcccttctttgtgtccatgtgtgatcaatgtttagcttccacttataagtgagaacatgaggtatttggttttctgttcccgtgttaatttgtttagaattattgggaggccgaggcaggtggatcacaaggtcaggcattcgagaccagcctgaccaacatgatgaaaccccgtctctactaaaaatacaaaaattagccaggcgtggtggtgcgtgcctgtaatcccagctactcaggaggctgaggcaggataatcacttgaacccgggaggcagaggttgcagtgagtcaagatcatgccactgcactgcactccagcctgggtaatagagtgagactctgtctcaaaaaaaaaaaaattatggtctccagctccatccatgttgctgtgaaggacacgatcttgttctgttttatggctgtgtagtattccatggtgtatatgtaccactttttttttatccagtctaccagtgatgggcatttaggttgaatccatgacgttgctattgtgaatagtgctgctatgaacatacaaatgcttgtgtctttatgatagaacaatgtatattcctttcagtatatacccagtaatgggattgctgggtcaaatggtacttctgctttaaattatttgagaaattaccacactgctttccacaacggcagaattaatttacactcctaccagcagtgtataagtgttgcctcttctctgcaacctcaccagcatctgttattttttgactttttaatcacagccattctgactggtgtgagatggtatctcattgtggttttgcatttctataatgattactcatgttgagcatttttttatatgcttgttggctgcatgtatatcttcttttgaaaagcatctgttcatgtcctttggctcactttttaatggggttgttttttgtttgtaaatttttttaagttccttatagatgctggatattagaagcatagttggcaaatattttctctcattctgtatgtaggctgtctgtttactctgcagaaagtttctttttgctgtgcagaagctctttaattaaatcccatttgtcaatttttgtttttgctgcaattgcttttggcatctttgtcgttaaatctttgctagggcctatgtgcagaatagtatttcctatgttatcttccagcgtttttatagttttaggttttacatttcagtctttaatccatcttgagttgatttttgtacatggtgtaaggaagggctccagtttcagtcttctgcatatgactagccagttatcccagcaccatttattgaatagggagtccttttcctattgcttgtttttgtcagttttgtcatgggtcaggtggttggaggtataccaccttatttctggactctattctattccattggtccatgtgtttgttttcgtaccagtaccatgctgttttggttactgtagacttgcagcatagtttgaagtcagttatcatgatacctccaactattaatatgttctttttacttaagattaccttggctattcagggtcttttttggttccatattaatctaaaccctggttagttttcttcctaagtatttattcttttattttctttgtttgtttgtttgaatgtttgaggcagagtcttgctctgtggcccacacttaagttcagtggcacaatcttggctcactgcaaactccacctcctgggttcaagcaattctcgtgcttcagcatcctgagtagctgggattacaggcacacaccactaggcctggctaatatttgcatttttagtagagacagggtttccccatgttggccaggtggtcttggactcctgacctcaagtgacccgcctgccttagcctcccaaagtgctgggattacaggtgtgagtcaccatgctcagctggtatttattctttttgtagctattgtgaatggtattcattcttgatttggctctcagcttgaatgtttttggtgtagaggactgctactcaccttggtgcattgattttgtatcctgaaactttgtttttcagataagggagcttttgggtagagactatgggattttccaggtatacaatcacatcatctgcaaacagagataaaatgacttcctctcttcctatttggatgcctttcatttctttctcttgcctgagcactctggctaggactttcagtactatgttgaacaggagtggagagagagggcatccttgtcttgttctggttctcaaggggaatgctttcagcttttgcccattcagtatgttggctgggggtttgtatcgatggctcttattattttgaggtacatttctttcatatctaattttttgaaggtttttaacatgaagggatgttgacttttattaaaagcctttttttcgtgcatctattgagatgattgtgtggttttcgtttttagttctgttgatgtgatgaatcacatttattgaatcgtgtgtgttgaaccaaatttgcatcccagagataaagccgacttgattgtgatagattagtttcttgctgtgctgctggactcagtttgctaatattttcttgaagaatgttgtgttgtgttcattaaggatattggcctgaagtttttgttgttgttgttgtgtccctgccaggttttggtatcagaatgatgttggcctcacagaatgcgttaggaagtagtctctcctcctccattttttggaatagtttcagtcagaatggtaccagctattctttatacatatggtagaattcggctgtgcatctcgctggtcctgggcttcactttggtttgaaatggttacattttcttgctttctctcatccacctcacatccctgctgaggagccgtcctttgggaggcccaggtggatggatcacgaggtcaggagcccgagaccagcctgaccaacatggtgaaaccccatctctactaaaaatacaaaaattagccaggcgtggtggcgggcacctgtaatcccagctactcaggaggctgaggcaggagaatcgcttgaacctgggaggcagaggttgcagtgagccgagatggcaccactgcactccagcctggtgacacagcaagactccgtctcaaaaaaaagataggaaaagatagataagcacctaacattttttatatgtttatgcagtctttttttttttggccaagtgtgactgtatatgtgtgtgcatgtatgcattgctttgctagttgagatcatgttgcataaactaatttctatgtgtagataacaggagcagttatagttcctagacagaggaggacatgtaaagaacattttaataacagataatatctgcctttgggaggtttatgattcattctcaattttcaaaaatctcaatgactcattattccatatgggttctttgattaactgctttcaattaaaaattaacatcgcatttagaaaaaacttccagagcacaaagtatatagaacgggaagcaagtctgtcttgtttatagatttccttagtcccgttcctcagaaataactactgctgcaaccaacttagccttccagaaatattttttcagacagtagaataaatacatgttaccatctattgacagtcaaacctacatgcgttatcagcttactatatgaatatatgttattgcttttagtactaatacccatatcatcacccatgtttatacaaacaggaatatagtgtatatgctgtactacaccttgattattttgcttaaatatttgaagaacttcaaagatatcagttcgtaaatattaacctctttttttttgcatggccatatagaggtataacaatttatttgctgagtgccttaataatggacccacagatggtctcctacgttttgctaagaaaagcaacgtggcactgaacatcctaatatgtgcatgctaaattatgagaagtagaattgctgggtcagcaagggtgcccattttaaatttatatatgctgccaaattggtctccaaactggtcacaatttactggccatgtgagagaatgacctgtgcttttggtgtcatatctaagaaattattgctgagaccgatgccaagaagcatttcccctatgttttcttctaggagtcttatggttgcagattttaaattgaaatgtttaatatattttgagttgatttgggggcatagtaaaagataagggtccaatttcattttgagggtgaggggagaggatatccagttttctcaacactagttgttgaagaggttatcatttccatattgtaccttcttgacatccttgttgaagatcagttgactatatatgcatgggtttgtttctgggatagctatcctgtttcattggtctatatgtctatttttatgctagtagcatactgagatttatctttgggatgcaaggattgttcaatacacacaaatcaatcaatgctgctatatcacattaatggaaggacaaaaatcacaattgtctcaatagatgcagaagcatttgacaaaattcaatattctttcacaataaaaactctcaacaaattaagtaaaattacatctcattgtagatgacatattatatgtaaaaccctaaaaaaaaaagccacaaaaacactgttagaaaaaattcagaaaatttgtagggtgcaaaatcaacctacaaagattagttgcatttctatatactaaaaatgaactatcctgaaaggaaattaagaaaacaataccatttacaaatagcaccaaaattaataaaatacttaggaataaacctagctaaggaggtgaaacacttgttcaccaaaaactataaaatgctgaagaaatccaatgcaatagaaataaatagaaagacatcccgtggtctatttacggattggaagaattaatattgttaaatatccactaccaaaaaccatctacaaattcattgctataaatgcaacataatcctgatcataatccccaagatattgacgggcattttttttaaactctaaaattaatatggaatcacgaaagagctccacagactacagcaattttgaagaaaaggaacaaagctggaggcatcacacttcctgacatcaatgtatattacaaagttacagtaatgcattcacctttacagaacaatttttctggaaatgtattttttcatccttttgtttttattgacactcttcattgttttttgtctatcatctattatattaatttattctatttttactattttatttcccctgctttttggatgtagtctggtttttgttttttattttaatttggaggcttgagttacatgctttgctcatcaactttcaataatatcttctatgcattgaaagctgtttccctgtaaagtaccattttagctgtatttctcaggcttaaatacatagtgtcatcattgtcattcagagctaaacacattctctaattttatttttttaaagatttcttctttgactcttgaattatttataagggtacttttaaggctccaaatacatgaaacattgcttacctttgttattgttcatttcaatttttgttaaattgtaatcgaaaactacattttattattttttgttttacacagttatcatttaaagtgattaaaaatgaaaatgtttgttatagtggcctttatttttacattttcaactttcatttccttatgaagatccaaattttcatctatcatacttccttttacctgaagaactttccttaccatgtcttgttatataacaaattatcttagctttcgtttggaaaaagatctttatttcatcttaatttttgaatggtgtttctgctaggtatagcattttgaattgatgttgctgttttattttcttttggtaaagatgtttctactttgtcatcttgtttccatactttgatgagaagtctgctggaattttcatcttcattcctttgtattctgctccacttcctctgcctacaagattttctttccatcatcagctttcaaaagttcgactattatgtatcgggctatgtttttctttgtgctagattttttttgatagtttttggacctataatttgctttcatttattttagaaattctcttatttctttcatttattttagaaaatctgtcatctcttcaaatatttattttgccactttctctgtcccttttgggataccaattatacatacacagtatcacagcatatctgttggctggcaaattttagtgtttacttatatatgtacagatctagttctttgtggccattatttgtgaaagcatttgagccagagaataagctgttttaacaggctgtttaatttttgctctcttttctcataaataattctcctaactgtaactgccagcctccaaaatggccctcactcattctcacctcctggcattctcaccacctggcattcatgtcactgtgtagtgccctcttgcactgaatagttaaataggattgacatatagaaccaatggaaaattgcagaaaagacagtgtgacttctaaggcaaaagctttgcatcttctgttttgttgtcttggattacttgctcttggagaattcatatcacatgaggaaaaccaagcagctaaatggagaggaccacattgcaaggaattgaggcctgtgccaaccacaagcaaagaactaaggcctactgcctacaggaggtcctgtcaaaggtttgactgcactttacgacagatcatgatccaaacccctccagcaaagctgttttagattcctgaccctcagaaatgatgtgacatagtaagtgtttattgtcttaatctgctaaattcatggataattaattatgcagcaacaaataactaatgcagatttcattttgttccaaggagatgcatgcttcatgtttgtaggctctctccctggctttccatgaagctctatgtctcagaagacttgtcctttacttttctttaattgatcaaacttaatagctatggggaagctttctattgttatgaagagactgttctgcttcacagtagcagagaggattcaaggaggcctataatatggtttggatacttgtcccctccaaattacctgttgaaatgtaatccccaatgttggaggtggagcctggtgggaggggtttggggcatgggccagatccttcatgaattccttggtgtcctcctcatggtaatgaatgagttttcactcttttagttcacctgagagctggttgtttaaagagtctggcacccctgctctctcttttgctccctctcttgtcatgcgatgcacctgctctcccttcactttctgccatgagttaaagcttcctgaggcctcaccagaagccaagcagatgctggcaccatgcttgtacagcctgcagaaccatgcgccaaataaaactcttttctttataaattacccagctgcaggtatttcttcacagcaacacaaaaatggactaacacatcctctattcatcttgtactcctcaatcttgacattttcagcaagaaataattctgtgctctgtcctctagttctggggcctctgacacttattctctcagtatacttaataccacaacattttcagctaatacttaagagtggtgttattgctaggtccccattctttccacatgtttgagaaggtaaaatccttgtactctacagaactgttttagagaagtcccctagagaagaggagcaagacgattgtcgtagtgtgctttattatgttctcataataaaaattaaaattactatttaatgcttaccatttatcagtgtaagaattaactttacaaggactgagttgactgagagattgtgaaaagttgtgctgatgaagttgggggtctggcccaattgtcaggaaaaggaaatagatgattagcaaatactgagttattgaaggaaacatggaggaagttgtagaaaggaataatgctagcatttttagttttgttttggggtgtgtgtgtgtgtgtgttgatttatctttttcaagagagggtgtgcttgtaattggactataaaggtatttcagggtatgtgatgtgtcattttcctcacaatccacttgtgcaaggtgcatgttgcatgggcaggcctccatggcttaccagaaccaaaaaggcctaaatcagagcagaaagactgagatttatgtgaggctgcacacctactaccactttgtttcctgctgatgatcatagctggcatggtaggtctctagaggttagtatcagctctaccccttcagtgtgaactttaaatctgcttaattgttaaccttcccatcaactcttgattgagtatgggtttcacctttttacacaatgaaacttaaagggataacataactcctttgagctacaggctggtaagtgttggaactcatgtataaactctagattttttattctgaaaaccacaaattttccactgtgttacctatgatttaagtagcactgatttatattcttccatgctgtatttttaagtagcacgcatttcctggcaagttcagagccagctttctcctccttgagggacacttctttaagtagaaactaaatgatgtgcaataaatatagttgctcttgccatggactcctcacagatgaaagctcttctctgacccatgaatgtgaccctgacggatcatgctgcctgtcctcaggccaaagctgggctgtgaattgctctctaaaattcactcacagccacagcccttgtctaacagaagcacactgcctgctttgaaattaagtgcagctgcgctgtgtcctgcatatggactaattagctcagtcatgtaagcttattgctcaaaaaggccaagtgcagggattcaatacctgggaaggcccatctgcaccaagaagaaaattggcccctacattttagaacagtgcttctccaaatgcggtccctagaccagcagcatcagcatcagcaccacctgggaacttgtcagaaatttagattcttaggctccaactcagatctgctcatcagaaattctgggggttgggaccccgcaaatctgagtgttaataagcctgccctgtgagtctgatacatgctcaagttggaggaccactggctttgagtatatttgtaatcgcattagaatattcagaagggacaaagaggtgtagttggttatttttatcccttctctattacagaaaaaatgtcacacacaatcattcagtcttctcataaaacatcattcctgcacgtactgctttaaatttttaaaaattagcgcttactgatccaaagaaaaacaaatcaactcatactaatagggagaccattttagcccaacattgactttttgaaagctgagtagctttatatggacataaaatcattccagaatggaaaactactgcctcaacttattacaaaaattgctagaaggttaccttaatttagagggaaagagaacttgtcaccagttgccttctagagcacggacttagatataagcacaggtggaaggcgtgagtctggggacttcctttatggtaggtaccctgactacatcaagactagtagattcagcacccagtcctctctggtttatcagcttccagagagagccagcctgcgggacacccacatgattccgattcccccatttggaagagacaaaggaagagcagtccgcctggttcttgtcactggtggagctgacagctttatatgctcaatggagggaggagctgaaaggaggtgccatgagagtgcatctatgtgacagggaggaaagatggatatttttatagaggaagaaatgcagtgaacaagggaaattagatggaaagaccataaaggtctcaggttggcaaaaccaattagtagatgtttacaaaagataacccctgaggtcacatagaatttgctttgatgtcgatactcttgagtttgaaaaatggatcagcaacctccacaccattgtgaccggaaagagacccaaggcttccttctgctggagcctccagccagctgtgcgcctttgggcaggtttcataaagtctcagacatccctttcctcttctgttaaaggagaggattgtataagatcactcttaaagtctcttgcagctctgacatgtcaggatgtcctctttaacttctagacatgtgggagggggtgcatttcagggctctatagttcataatgtggctcctgaggattttctgggcagtctatgaacttctgttacctacttggagagaaagagcttctcatctcttttactttgagtttatcttagccatttggaaacaggagtcatttaaatcgaaatgagagcaaactccgggatatgtcctttgagaatttcccaggtgtctggtgagctttgccttaatgcgaacccaccggttcaaaagacaaaaccagaaactatggtactaggtccaaataggccaagtatataatttctttttgaaattttgactgtgctttcttggatgctcttgctaaaagtatcatagggaaaaatgtcaggacatccagggagataaaaagggattctggagaaagagaagcgtagggaattgttatctcacctccctctggaaaaaggtggagtccaagtaagtaaaaagagggaaagtcaacttgcccaaactcaaaaatggagctagggcctgaccctaagtcttattattgtgactgtttattctattattaaaattaacacctccccttgattggactcctgtcatgtcccagccactatgccagtctgtggtatttcaatgaatgctgtcaacaattgtggagggatattctcagtgctgctaaatgtttaacaaccagctcttcatatatatttatatagaaatatgtaaagagaaaaaagccctgccttgcagcttttgccaattttaatggtgtaaatactcccaccatggccaatttcaagctgccaacattacatcgctgaacacagagttgggaaaaagatatgtaccgctggctgtcacaggcaggtgaaggctggcttcagcaccgccctggttcttgttcccatgttaaatatgaagactcagagacccagagagaataatttgggtaagacacccagcaagcaggtgttagagacaggttttgcacccaggcagcctgactccaatcttgggttcttcatcatgatggttcactgtctatctctaaaatgtagcagttgaacatttgggggaaatgcctaatgcagatgcctccacacactgattatgaacttctattctaatcctgtacgttatcaatttgttctaccaggtttctacagattctgggtatatgaaagagaacttactctcctcaggacccccagtccctacttgaatcaccaccttgatcgatccccagtacctctgtttgtccagagtcttttcatcctctcccataagtcccaagaaaagccagaaaacattctgaatacttgaaaaaccatatctgagacctataaaaagttcatgaggttccattttctttagtaatctttgtcggtcaaagaccatttgtttaatgttcatgcgtgggaatgatgggttatgcagaagcagctatttagtatctgaagcttacagcaatctcaaaagcatttctatttcttactcctggctctcaatgaatggatacacttttgcaatggagtcactgccacctgtcctgtgaaattacgtttcatgaagcattaaggagctgcttctggcttagatggaatgtcttggtgtaataagaattgtgggaagcagaaaaccctctctgagtcccaagctcccacctgcagtccagctctgaaaaagggagtcagtgttttcatctcagttttctcaatgggagaaagcaattgtaatatctgtcctgcttatcttccaggatcgctcagtggatccacatgaaagagttttgaaaactataaaacattacacaaatagaaagtaggatcattcatcacagagtaataccaactgaagagctgtatggttttgccaaaattcacagaatcctttagaaacaatgaaactaaagttttatgcatataattcttccctgaacctctaaagaggtcagtttcttgatatgtggaaggcatccctcatatttaaatgactagactcgtgtttatagtatatattgagaaattgtaaagagatccattgatacaagccacaaaactcaacaattttaacttatgtcaatttggatatttgtataaaatatattaactaatatgttttttaaaagaatggtcacttttatttaaattttagaattcattaagatattagtagaaatattttctttaattttctttaagaggaaactaacgcatcataccaaaacactgcagtgagtactaaaattgtaaaactaagaacacagtttaatagttattacttttggacatttgccctgagatttgtctttatttgtctaaacacactgtgcattgtttatcatttttatgattacttattttaatttgctaggaaaatagatatttttcaggcaaaaaatattaaaagatatgtcactgcacatctcataccaagcaaatacatctcatactattgtttgttttagttatcaactgtttccaagtgtcaatcacatcggtaaagttatgacagattattctaaaagtcttaatctgaccataatggaaacaaatccataaaaacattatgttgataaagcataatccctcaaaaatggtaaaaatagctaaaagtggaggaagtaaataaaacacagaacttcataataggaaataaatgttgctatgttataaatatacagctaaggcccttggacagaatttagagaggcattgacaataaattaactagctgtttctaaaacatgtcaaccaaatgaatcattagctaatacttttttttgtttgtttgaaccggagtcttgttctgtcaccagacggagtcttgctctgtcgccaggctggagtacagtggcgcgatcttggctcactgcaacctctgcctcccgggttcaaacaatacttctgcctcagcctcccgagtagctgggattacaggcgcccgccaccacgccagactaaatttttgtatttttagtagagatggggtttcactatgttggccaggctgatctcgaactcctgacactgtgatccaccctcctcagcttcccaaagtgctgggattagaggtgtgagccaccgcggctggtcctaactaatacttttaattaaaattacagttgttctggtttataccacagctgtggggttttaaaatatatttttaaaggtttaagatatgaatttggtgggaattgctgtagggagtttctcattttaatctactgcaaaaacagaactgcataattttaaaattgaagaaaagcttctagagagtgttttacaaattttggcagcatcagagtcaaacacagactgcggtgcctcagctgcaagtttctgattctgtaggtctggggtggggccccaaatatccatttctaacaactttccaggggatgctgaggctgctggtcccaggaccacactttgagaattgctgcactgaagtaactaacatgatttttttttaaatcaactttccccagagctcaatctagatgcaggaatcggatttcaagtccaacatcatcctgctacttccacccgtatgaattctctgcaaggatcacaggctttgggacttaagccttgctaatgatgagaaggctctctatacactattgtgcagaagaaaaatatacatttgctaattagctctaattggacagacttctgagcaataaagtctgtgctaggaggctcaaagaaaagctgacatccttttttttctgctttagtaacacaggctaaattccagagccagagggaggaggaaaactagcctgaagaaagtcatcaaaattagaattaaaaaaaaaaagttaaacctaacaaatgttttaaatcatttaatctaagtaattagcaaagtaccttacattaatagcacaccttccttataaatcacatattatgttttactgtgtgtaaagtacatttaattatcaaaagcttgcaaggtgcttatcatgtgccagacattgtttgaagtgctttacagatttaaaaaaccctcagttaattttcaccatagccctgtgaaggaggaactcttcttttccctgtttcataaggtgaagaaactggcacagagaagctaaggaaattgcagaggtcacacagccaggaagggacagcccaaggatttgaacccaatcagcgtgagtccagcatttgtgctcttggcctccaggctctgatgcttgcttactggctaaggttgaaacaatcttgtcaatttaaaacgtggctgcactttagactcacctaaggggattctaaaaagtgctaatacctggaccatccccaaacaaattgaatgaaaatctttggggatgtagcccaggtattggtatgtgttaaaagtgccctcggcgattgtaatatgtggccaggattgagaacaactgtgctaaaatgtcaggtgactatgttgaccctccagatttgctttattttctatttttattttatttatttgttttttctttttttttgagacagagtctcgccctgtcgcccaggctggagtgcaatggtgccatcttggctcactgcaacctccacctcccaggttcaaaccattctcctacctcagcctccccagtagctgggattacaggcgctcgccagtgctcgccaccatacctagctaatttttgtattttagtagagacggggtttcaccatgttgaccaggctagtctcgaactcctgacctcgggatctgcccgcctcggcatcccaaggtgctgggattacagacgtgagccaccgcgcccggcctgctttttcttttaaagcaactgagatgacagcatcattatggctacattgtacacgtttgggaagggagcactaaggaaggacaagtacataagacattgctccaggaaagccagaaccaagaaagaggcaggtgaaattaaagcaaggcatcgatttaaccaattagtggcttctggatattgttgacgaaacttctcggcacttacagatttactcttcctatgctttattcttattcattctcgtttcacataggaccaaactaatttttcacacacgccttgattttttgcctcggagcttctagtttctgacctaaacctaaacctaaactaaactctttcctaaacctttttctgttacctggccagaaaggctcagtctccaggcagcggatttcaggggaaatttacgacatctaatggtgcagccagccagcctggtaaggatttgagactaacatcaagaaggaattgtggctgacacagttatgaggaagtggctggcctcagggttacatagtttccctttgaacagttactcctgtttcctttaagcatccaatgacgcctgatcatcttaaaacaagactaaccacaaggctttaataccaattacatgagattaaacaggaaatgattactaagaattaaatgtgaaaaatagtaatactaatagtgtagtattgacacaaattgtgctcaagaatggctgctaatgggagcagcatctgcccgggtcatatcagcagctgcttgtcatcacatgcagcctcagagcccggatcttacacatcccacctagcctcccaccaacaccattagccttatttaaaccaaaggaaatcagatgcatggaagcgaaggacctttccccagcacatggcattcttgaaaggaagagccaagatttgaaccctaccttgactctgaactaggactggataccatttgcagagactaatgcaaaatgaaaatgcgggcttccttgttaaaaaaaattaagaatttcaaaatggcaaccacagagcaccaaaccaagcacagggcccttttaagggtggggccctgtagaactgcacaggtcaccggcccagaaagctggccctgctcaaagcccttcctcctcaaaatacagttcagagtcagcagcatcagcatcccctgggagctaattagaaatgcagaatctcaggctgcactccatacccaccaaaccagagtctacattttgacaaaattccttaggagactccagtgcacattaaacctacagatgcccagctatgaagcctcagtcctctcatcctgggcttgccttcatcagattttcaaagcactggtttctggtctcacatcccccccccacccgtcaccaccttgggatacaaatgtggtcaatcttttatttctgcacatagttgcacacataccatctgtacatattagcagaaagtctcaagtctcactgaaaggtgaagccggctgggcttctgggtcgggtggggacttggagaacttttctgcgtagctagagaattgtaaatgcaccaatcagcgctctgtgtctagctaaaggtttgtaaacacaccaatcaacactctgcaaaaatggaccaatcagctctccataaaatggaccaatcagctctctgtaaaatggaccaatcagctctctgtaaaatggaccaatcagcaggatgtgggtggggacaaataagggtataaaagctggccacccgcgcaaacagcggtaacttggttgggtgttcttctctgctgtgtaggctttgttcttttgctctttgcagtaaatgttgctgctgctgactgttgggtcccagccgtctttaaaagctattacactcacggtgaaggtctgtggtttcactcctgaaatcaagcgagtgtacgaacccaccggaaggaagaaactccagactccgaaggaacaaactctggacacaccaaatgtaagaattgtaacactcaccgcgacggtccgtggcgtccaccctcgcagcttctttcttgaagtcgccgagaccaagagcgcaccgaaaggaaccaattgtggacacatccgttttgtgagttatttcttcttccctttttctgctactgaccagtccccaccacgagttatttggtggctgcctccaaagaggcgctggggcagagaggtcaatcctcttgtagatcctgtggtgccaaacccctattaatcgcaagaggcatagcgtcaggttcaggaagccagaaccttggagctaacaagtgagacatggggttttatgagtgggaaacttacagatagagtggttcagtggcggcaagctggatggaagaaccaccaccacttgcaaaaagcatagaatatatggcattttcacttagcaccctcccgttaacaaccgccacctggtaagcttcatttaaccccaaagggccttgatcccctctaccagcctatctgtgtttaacagggtgagctagggacttaaaagttccttatagataagaaaggaattggccaggtgcagtggctcatgcctgaatcccagcactttgggaggctgagaccagcctggccaacgtagtgaaaccctgtctctactaaaaatacacaaaattagttgggcgtgctggcgggcacctgtaatcctagctactcgggaggctgaggtaggagaatctcttgaacccgggaggcggaggttgcagtgagccgagattgtgccattgcactccagcctgggcaacagactccatctcaaaaaaaaggaatttccaggttggctactcccaattcccttagcttggaaccctgaacaaacattcaggtgcatctgccatacagggttgttctcagggtgtttttttaaattttattttgtttgtttattttttttttttttgagacggaggctcgctctgtcacccaggctggagtgcagtggcgtgatttcagctcactgcaaacactgcctcccggattcacgccgttctcctgcctcagcctcccaagtagctgggactacaggcgtccgtcaccacgcctggctaattttttgtatttttagtagaggcggggtttcactgtgttagccaagatggtctcaatctcctgacctcgtgatccgcccacctccgcctcccaaagtgctgggattacaggcgtgagccaccgtgcccagccccgggtgttcttaagtggttgctgtcaggtacatctaccacgcagatgcaggtcgtctgctacagcgatgcacttgctggtgcagatcgccaatgaactccctgagttgggctcaactaagttgctcttttgttccaggacgttgttcccaaagcatggccgtgtgtcagagtggcggggtctgcaggtctctcattcttcctctgcctaacgtgcattgctaggcaacccacatagacaccccttcctccacagggcaatgcactgtggggaccttagcatcgtttcctggcaggggacttatttgggaccgtctcaatccatgagtgagactctgataacactgaatttcagaacgctaggtgtcctgattcatctcctgcccatataagttcctctggtcagcagggcagtggccccctaaagatgtacatgtcctaagaccccaatcctatgaatatgtctctttacatgataaaagggatacatcaaatgtgacaaagttaaggatcttgaaggggggagactattctggattatctggtgagccggatgtaattgtaaggagccttataagagggaggcaggaaggtcagagtcagagaaggtgatgtggtaacagaagcaatggttgtgtgatgcagctgtgagccaaggaatgcaggaagcctccggaagctgggaaaggcaaggaaacgccttctccctagagccttcagaaggaatgcagacctgctaacctattttacgattctgactttcagaactgtaagaaaataaatgtgtgttgctttaagatacgaaattagtggtaacttgtcataagagtaattggaagcaaacacagctcttaagcaaatgtgtctgtccctgccgaagcaatcatttcagtgtaatggaacgttgtggaaagggcagtcctcaacaggctagcaggtctccatagacctgtctcctggtacagcaggtgcttattacatgccccaaagagaccactcacatcattttttcccccttgaaaatgtgttccaatgagtaatttgttgccctactcacagatgtattaagagaataggctggcatcactttacaattgaaccccgtcagtcgtgaggttacccaaaacattgcaaaaggagtggagatgcccactgagtcaactctccactgaatccagggcttccttcccctctgtttcttgcctgttctaaaccagttgtcttccaacttcaagactctcccttgtctctcagagccacttgacttgtcccatccaaggacaaatggaagctctctacttattttgcaaactttccaaagccttttatagtgaccacaccctcacctctcagatccaatttttggtcaaaaagacgggtgtagtccacaagggatgggaaggagagtacaaagtcacagggtgtcccctcagactcaggggagtgcttccatccaccttcaggagtgcccagatcctggctggatgtctgaatcccttgagggactttaaaaaataccccaccacaaaccagttaaatcagaatctttcgtgataacagcttggacatctgtattttaaacaaatattccaggtgattctaaagtgtagccaatccctacttagattatgatccactcaggagacgaatccttcaaaagtgaaatcttccattacaggttagaagttattctggaaagtccagcataaacctttcataccaaaaacccattctaagttgagggttaccaatttaaaggactgtgaactagtaggtatttagaatccttgggtacttaggtgcctttgatattctcccttaagggtctcaatgctgaaccatttgttacatatgtcatctcacctcacttagtctgtttcttcattttagagtggaataatagtccttggttctctggacaaccgggagaattgcattttctgaggcccacgataagcacccaaccgttaatatttccatgcttctctgtccatcccatggagcctggggcttgagggactgtgcagtgaggcagcaactcacatctccagctgttggactggtcctgccagcgacgtctgctcagtagaacaagcagcacttcccccagctcagcactgtctcatttctgagactgaacaccccgtggtcactctacatggatgggtaggtttcctgaaggcagtgcagtggattttaatacccagggcctggtctcctatggcaggtggcacttaagttctctgcagaggcagacattttttgttttggagtctgcaagaatatctagccatcacttcttccccacaagaacaatgggtgatgcactatgttgtacctggatctaatgatgaatgaaatggttgtaacatttggctttagaagttgtttcaaatgcaataaatcatacctggcacacaagcaggttgttacaaaacagctgctgatggaacctgtcaatgacatcttctctttgaacgccgctgccttccccagtggccagggatagttttgtaagcagttaactcacctgaggcccacaaaatggcagagtacagatgagaggcatttctccacggcagtaagcctcctttctctggatctcagagtctgatcttagacctgctctgccctggcaaaccatagggatgtgctgatgccagacctgctgagcactggtcacctttgtctgcaaaaatacttcttgcacaggcatgtttacagcatgatgtgaagccctccccaagacctctggaggatgagtcaggagccaggacacaaggagaaggcccagacagaagataggtttgggaagaggatggaaaaagactgcagaccagacaggttggggaaggggcatagggcatatcttactgctgagctctgcaaagccaaagttgtcagaggttctgttactttctctcaaagacattgtctgctggaacaggaaaaatatcctgaaagaaaagagcaggacaatcctatcactgcagcagggggagtcataagcttcaggggctggggaactgagagggaagaagcccaaaaagagctttctggaagtctggaaatacaagatgtttccctggtcctttggtaaacaacccctatctgggggctgggtgtgggtgtcttgtcaccttgtagatctataggtcatgcagtcacagggaatgcctaatttatgaaagataatgagtccatgaaatatttgtgaaggtcctagaaattagccaacttgagggatttgttgtccatatctaaaaatctttttcttccttttttttccaggctttaaaaaaagctttttctttttccctcatgttttggtctgctatggaactgagatattttctaatttcactgaggtctattttaggaattaatatggtttggctgtgtccccacccaaatctcatcttgaattatacttcccataatccccacaggtcatgggaggaacctggtgggaggtaattgaatcatggaggcggttacccttacagtgttctcatgatagtgagtgagttctcatgacatctgatggttttataaggggcatttccccctttgctcagcacttcgccttcctgccaccacgtgaagaaggatgtgtttgcttccccttctaccgtgattgtaagtttcgtgaggcttacccaggcctgtgaaactgagtcaattaaacctctttccttaataaattacctagtcttgcatatttcttcgtagcagcatgagaatgaactaatatgagggctaaaaaataattgcttatgtggtaagctgaaggattgttccaactaagagtcctatgccgtagggaaaaacatttatttaaattaataattccttttttttaaaaaaagcattatatatattttttgagtcttactgaatctttttttctttttacaggttaatttcccttggaaaagtattgatgatcaagtgatgctagcagcaacagtgttaaaggctttaacgcttttaaaggtgagacttttgggagttgattaggtcatgaggatggagcctggtgaatgggatcagtgaaagaggcctgatgtgaggtaagtgttgatcaaaagaaaaaaccagttaggaacaataggttcaagagctctgtggtacaatatggtgactataattaatagcaatacgttgcattcttgaaaattgctaagggagtagattctaagagttcttacgacaaaaagtatgtgaggtaatgcatttgttaattagcttgatttagccattttacagtgtaagcatatttcaaaacaagtatttgtcaatttaaaataattagtaaactagtttagaaacaaaggccctagagagacaccttctactgcataaggacagagaagtccgtagtcttcaacccaaaagagggtcctcaccagaattccaccatgccagcaccctaccctcagacttcagctcccagagctgtgagaagtaaatttctgttgtttataagccacccagtctacggtatttttgttatagcagcctgaacagactaaggaaggaaagaatttagtcaaaaggccaagagactgttacctaaagacaatttagagagactattctgggacacaattttttttaaccagtattttctttcagaactcccttcagtttgacttttcttaccactaactgacatgaattcataaagattgtcacatactttgtggtaaatctggaatctttcttcaaattatagatgccccggtgcttagtcattttgtttaaaaataatatatgttaaattcttgtttaaatggaaatttttgtatgtgcgccaagagtcagcctcccctacttattctggtataaacctagtttttcatcaagagtaagtcattaaataagttcttaagaggattgctaccattttgtcaaatcatgtaattactggataaagaagacctggagaagaggagaaaggaggctgtttcagtcctcttaggataataaattgtcaggaaaatgtctgattaaggaaaaaacacaggatcctatagtgatacttggtgggacactaatacataaagaatgcaaagtttatgttttatacagtcgtaacatcctgattatggtatacaagtaatatatgattgaggctgctaagataaacttctagaggtaagagaaaactgctgagaggatttttattagaaagtttgttctgaatttttgtgcagacttcaaaatacagattcaggggaagtcagaagcaacatttagatcaactcttacacctaaacctcaagattagattcagcactgataaatgcaaagcacctcaattatagccaagcgcttaaacttacctcccaaggtagcgtttaaatgtatctctaattacagttgacatacctgttgctctaaaagatcttttttgttttatttttaaaattgatataattgtacatattcatggggtacctagtgatgtttccacatatataatgtatagtgatttgattagggtaatgaacatatccgtcatctttttttcttttttcttttcttttttttttttttttttgagatggagtctcgctctattgcccaggctggagtgcagtggcgcaatctcagctcactgcatgctccgcctcccaggttcatgccattctcctgcctcatcctcctgagtagctgggactacaggcacccaccaccacgcctagctactttttttgtatttttagtagagacggggtttcaccatgttagccaggatggtctcaatctcctgaccttgtgatgtgttcgccttggcttcccaaagtgctgggattacaggcgtgagccaccgcgcccggccacatatgggtcatcttaagcctttatgatttctttgtgttcagaacatttgatatccctcttccagctactggaaactatgttaactatagtcattttacagtccaatagaacgctagaacttatgcctcctttctgactgtaattttgtattctttaacaaatctctatacacccccttcatctcctcccattcccagccgtcaatatcctctgttgcacattttacttctatgatatcaacttacttagcttccacatatgagtgagaacatgcagtgtttaacttcctatgcatgggttattcacttaacataatgtcttccaattccatgcaggttgccaagaatgacaggattttattttttaatgggtgaatagtattccattccaaaatatatactacaatttctttatccagtcttctgttgttggacacctaggttgattccgttaaaagatttttttataaggagccacatggaaaatcaaacagacctggttgttgagactggcaggtgttcacctggcatccccagagttcagggacactgtctagaaataaactcttgaagaggaaacaagctgaaatatacaaagaagctctgttgtaagacttccttgtggctacaccgataacctacaccttttttaccttctctgtcacaaacgttttctcaccccttggacagttgtcactacttgtccccattgccctggtacttgttagcctacacattatgtttcccacatttatgttcctgaagttttaactcttttactcccctctgtgcagttttccttggaagagcccccccgaacctccaaccatcccctttgtttctttggcttagaaatctctttctcgcagaaatttcctttcttttccaattccaacagctttaaaatggctctatttggttggatatagtcagaactaccacaaggtgttaccccaacaaaaatttgaaaattagattagttccattagtattttgaaattgctgtaaaatggattcagccagagagaccctagggaagaaaaaccaaaatgatcccagacattttactgtagccccttgtctaaagcgaaatgcgtcactctaaaagggacgtggtggttcctctaatgaagttcagagaaagtgtctctaaatgccttgggcacagtctaggggagagagagggagacaggtgagttgtgtagttcgtgcccattgaaagcccaccttatcacggacatatctgcatcaggcattctaggcttgctaattagacggtcacttcagctgcttccccttttgatttcatgcccaacaagattcatgattatgaattggcttcatatgtaggtttgcccataaggaaggaatgtgctggtcatgctgaaaggcatattccaggcgggtgacacatcttttgttataaatggttaaattagaacactgattttatagctcagtcttttgagtttgattaatgtgttttcccctcagtcccagtacgctgaaaggacaagtttctaaacttgtcaggctaagaaccaaaccctggaccagagtaaattcacccaaaaactccacctgacaaggccttgtggatgactgacattcctgcatgcccctgacaatgctccaacctcacccaacattttctcctttgcgtgtctacagatgccttatgtttgctatgggtcagatgtctgtcattatggaaactctcagtaaattcaagttgacttgaacttgactcaacttgctagtaatggaaggattttcctatgccagtttccaagttttcccattattgtcaagagtaccaggattctcaataagacaagcttggccaggcacggtggctcatgccagtgatcccagcactttgggaggccgaggcaggcagatcacgaggtcaggagttcaagaccatcctggccaacatggtgaaactttatctctactaaaaatacaaaaaagctagctgggcgtggtggcatgcacctgtagtcccaattacttgggaggctgaggcacgagaatcgcttgaacccaggaggtggaggttgcagtaagccgagatcgtgccactgcactccagcctggcaacagaatgagactccatctcaaaaaaaaaagctgaaagactcagcagtgttaatcccaacctcatagctcatttttattcagaaaatgtgtactattggtaatttttaatgtctcaactgccttatctgcttttttctaccatgatagacctaatgctagactttatcaactcatgctggagttaatgaggtggcctcttaaccataattctggtctcttaatgtcatttctttttttttttttttttttttttgagacggagtctcgctctgtcgcccaggctggagtgcagtggcgggatctcggctcactgcaagctccgcctcccgggttcacgccattctcctgcctcagcctcccaagtagctgggactacaggcatccgccaccacgcccggctaattttttgtatttttagtagagacggggtttcaccgttttagccgggatggtctcgatctcctgacctcgtgatccgcccgcctcggcctcccaaagtgctgggattacaggcgtgagccaccgcgcctggcctcttaatgtcatttctaacctcctccatctggtatatctcttataattaatattgccaagtagaacacatctgattccctcataagggttatccataattgggcccaataccactcacccatcttattttcattgctcaaatatatactttacactcagtcatgtggtccatcagttttgtattgctgagtagcaaaccatcgcagatcttcaggctaagacaacaattatttattttgctcacgacactgcaatttgggaaggactatgtgaagactgctagtccagtctacatgcagcataagctggagcagcttgactgggggtcagatgatccactgtgaagatggcccactctcatagctggcaaattggtgctcagccaagactgcaggatggtgtctcttcacgtcctcaggctgctagggcttcctcacagcgtggtagctgggttccaagtgtcagcatcctaagagaaccaagaggaaactgtatcacattttattacctacctttggaagttgaagagtcacaagagcacccaaattctaggggagaaaataaagatctttattcaattgaatgaatcaagatcacactagaagatgagagagaagaaagggaaaggagagaaaaaggaaaaggaagagaggaagggaggaatggagggaggaagaaaatagaatgggaaatattttttggcagtctttttagaaaaatgcagtcggctgcactttgaatcagtggttggtttaggagagtggtcgagtaacacttcctatctggagaataatgtattatctaatcacattcatagatcttggagttctgtatctcatatcacagttgagaaaactaacacccacaaaagttgtgacttacccaggtcatgattagtggcagatctgggaatagaacctgagtctatttaactaccctggcagatttttattcagtacgtccggatgagcattgggaaatgcatgtttttaatacatgtacaaggtgagtcttataagcagacaaatttgaagaacactgctacagcttactgcacactgctgcagttacagactggcacatgggcagcttgttacagaaattcagaagggtgtggttgcatagcctgaatatttaaagccttctccaaatggaagacattattattagtccatagcctgggagtgcaaactaatctccctggataatgagaatgactagtcaagttccccatcctgcccttgagaaataggaatcaggtacagacttgttggggataatttaatccatgctggtgtgctggcatgctgccttttttccgtcgcatgattccagaagaaagtaacctgttgccacaagcagaaatcgttcaggtaccagctgcaaatgtgaactggcagaagcgagagagcccttcattatgcaattatccataattaggtgctcattactactttatcatcagggagccagctcccacctgtgcaggattgtcgtggggactggcaagcagagtggaacagagctttgcttgttctctaggaacgtgacatctgaaatcggcagtttcaacctgcacatggggagaggccatactgacatgcagacagatgcagacacatggaggccaactatgtaaattatgcagatgtcataatcctggcattcacttaaggttttgcttgtgatagatgcatgatagagaatgggggtggaagggaagcggccactgctactttatcctcagttaattgagaaatagtttatattcagaataaaatgtccttaagccagaaataagagcttgaagtggtgaaaagtggaagactcagaatttgctttaccttttctttgttaaaaaaaaaagtcctcattattaagtgcttcctggccaaattaagagcaaagactctttgtcattttatgtcctgccgtatattacctagcaaacaccagactgtcagtaagtgtttccataaatgggggtggctggacaaacaatgttaacagatgaagggaagatgtgcagagagggtcttgctttaatgcatagagaaaaaaacgtgattagcttgtgaaatactcataaggaaacaggaaaacacaagtccaagtacttaaaccaattatataaagaggggccacttttcctgtattaataagcacaagtgatacaaagtattacagatcttgaattcaaaccggaatcagtaagggataacaggcatacattcagtgtggtgagttaagcaccgtcgcaatctcagttttcattaaagtaaaaatattggggtttcttgtatcccataaatgataactgctctgcagaattatccatgcttccctgccttccagaaaggaaaaagcatatgagtaaatttattgatttatgtacattctacagcttcagtagttaaaagattctggtgttactggcaccaatagacacaggtatctttaactgaatgcaggtttagaattagcctcaaaatatataggggttctggaattagacagtggtgataattgtacaattttgtgaatatactaaaaaccacttaattttagaatatgatataaatatgaattcggaatatgataaaggtgacacttctgaaatttctagataacattggttcaaatgaattgatagcgtaggaaaaaatagagcatccctttgcttaatataccaaatttattgaaaatgtatatattgaataaaatattctttctacaaaaaacccaggcaaactattttttatcatcctattgtgggagggccttttaaagcattataaaaatcttccaaactcaaactgataattttattatttttttctttcaacttttactttgggttcaggaggtgtatgtgcaggtttgttacatgggtaaattgcctgtcgctgggctttggagtagaaacgatcccatcatccaggtagtaagcatagtaccccatagtttttcagcccttactgcctccctgttccttccttccccttctagaagtccctacaaaactgatcagtttaatcacataatttaaaactcataatacatagcaaaattctttttaaatgctacatacaaagtcgaggcaaacagtataaggggaagaaaaacttacagcatgtgatgaagggctaatttttgtgacatgcagaactcatacggatcaatgaaacatataacctgacagacaaacaaaaacgtgtatacatgaacagctcacagaaataaatatcaatagcaaacaaatacattaactcttattcataattaaagtagcaaatataaccatgcaatgccagtttttaacctgtcagaattggtaaatattaagatttataggtggtaaaaaatatatagtatcttaaatcagactacccttgggttccaagcttggtttcaccacttactagctgggttacctcaggtaaattacttagcctctctgtgcttgactcctcttctatagaatggaaaaaaaatacttacaaagttgtgaagaagatagagtgagaaaatatacaaaaagcacttagaaaagagcctttcacataggatgcactaaataaatgtgagactttgaaggagtgtgcaaaaaatagctacaattttgatttgttgggaacttagaacaatctttttggaggacagttaatgatatctttctttcttttattttccttccttccttccttcctgccttcctttcttttctttctctctctctctttctttctttgattttcttgagacagggttgtactctgtcacccaggctggagtgcagtggtgccatcttagctcactataatctccatttcctgggctcaagtgatcctcctgctgcctcagcctgctgagtagctgggactacaaacaggcaccatcgcacctagctaattttttgtagagatgcggttttgccatgttgcctagtctgaaatatctgactatatttaagttcacataccccaagcaatgactcagccgtgccactgctaggatttaactatatggctatattcataaaagtgcactgaattatctgtgtaggattgcttactggagcattgttagtaatcaatcacaaaatgggaaacaagtttgtcaatatggaagctgctattagaatacaatgcagctctcaaaaagtacagggattgttacgcataaactgataaaagatctcagaggtaattttgagtgagaccaaacaaggtacaagattttatatgaggatgaaatgaacttgtttatataattaaaaatatatgaattattaaggaaaaagaactaaattatatttatctccttttttttcttcttctcccacatgcagagaatttagtttctctaaaggtctgtgctttttttatattctccttcttgaaagagcacgaaagctactagagtgtcaggctcatgaaggacactaatgtggggtccaggtatgtggaattggagtccagtgcttggagttagaagggtagaagtgactcattccagaaattcaggtgcttgtagagccctcaaagactgaaaacctaggggaattaggttttgcagtttccatgagcagtaaggacttaaggctcctcccccaagaagggggctttttatcagatgggactgggtagagggtccccaggcaggccaggcaaggaacagagaggctgtcaggcttggacattgcccttgagcctaaagtagagatcagtttctcttgctttcaagaaaacgtagaaatccagacaatgatcacatcaaaggtgaccaatatggactgaagaccagaggatccttctctgagtcgtctggacagcagaagactgtaaagattccaatgcaatgtggggagggagaagggccccccaaaacgtgacttgggatttaatgtccctgctaccaaaaagatggctttggtgtccaaggatttgaaaagacgaattttagtttttacctttccatattctttagaacattaatatataataatagtatagaaaatgtatatacttgcaatatagataatttgtaaagaaagaagcttggtatgaagaaatgttttataggatttgaaagtagagtaatgttcctttgggtaggggatatctcttccaggactcttgattctaccttctgtaatgtggagacagcacctaacttactccttgggtggttgtgagattgaatgagatctttacgcaatctctatgagatctctatatccctagcatctggaagatgataaagggctgctagtcatattctatgaagccacaaacaactgccaataagggtgggggtcctattagaaggaggagttaatgcttcatgtgtctttcttttaacgtatggtccccaacatcactataaggacaatggtggcagaaagggcaggggaatcttaataaagctaagttgtctgttaaggggacttatcatgtgaacatttgccctggctatttcttctgcctggaaaacttttcccttaaatattcactcaggtaactccttcacctgtaagtattctctaaaatgtcactgtagcctacctggacgatcctaattaacactgtaatccccttggcactcccaatgcccgtgaccttgttctaattcacccctagccccatagtttttaatcatctaacaagttacatattacatttgttttctaattggttcacttctctacacatacatacacacacacacacacacacacacgccctcagtctgcaggctgcatgcaggaagggattttcttctgcttatgatgaatcagaagcatttagaaaagtgtctaacccatgatacatgctcaaaaattagttgaataaggaaaattgtgaatgcctcttattgcttctatatgataccctttaatgttagaatctatgtactgttgttaccattacaagaataattagtgatcttgatctttaggatggaaaaaaagtccagactaacagtagtgatggaaagaatttgacattttgtctactctcctctctgccttgagcagtctttgtaaccttggaagtcatttcacccttcgggattggcatgaaaatctaagacgtctatctctaatatttcactttcaataactcactatagaagtggacatgccagatgctggctgcatcctttatgtgtaatctcactgggtgatattaattgggatgaatagggcagtaatcttcttttcttgggaaaggaagagactgggcaccaaaaaacctgatgagaagtgatatcatcagcagagaggtggtaataaactgaactaaggcagtgagatttgaaaacaaaaacacaatcttaaagctgttaggctttaaaactccagggtgttccatttgccctgtgccgtaaaaatgacagagttgggttaagggttctgtaccccttattagccattagcattaacaacaaagatgaaagacgttaagggcaatttttgtcactgagatctgaatttattttccttcactgaatcttaaattagtagttaactgatggcaagacctgtaccaagaaggtcatgtttccagccaacatttcctaaacccattagatatcagtattctacagcccataaatttggaagctggagtctgccaagaccaagactaacagagggggggaatatcatacacattcaatcacactatcttaagtttatcttttagaagcagatgttagcctatctcttgcatccaacaggatgcaacataagaagagctcatggatcggagctttagtgtagaaaatccttttagtttttgatcttttccttttccagaaatactgtcagttcctgggaaccattatctacttactaaggtttaagtgttacttagatgtcctaggttactattaagctaaaatccaattgaaaagaacaaagaaagtttgtttgtttgtttgtttgttccaaacaaagaaattggttggagtggtcctgaaagactttatatattccattttggtccagggaggtttttgattctaccttacgcttctaaaagtctcagcacagataacagtttcccaaataatctttttacttaggctgccttttaaatagcatgacacttgtttggggggaacaatagagaccaaggaaaggtattagcatttatttcatactaattgtttataggacactgtgctttctcatatactaggatttaattttcccaatagcgttttttgagagaaattattcccatttcacagatgaaactattgcctacaagcactggaaccagcagcaacatcataagctggtctgggaaccccaatttgagaaccatatacctagaccttgctgtctagtctttgatacttctgcttggtatgccgtcatacctttgctttatttattcattcaacaaatacttactgaatttcaagtatatttcaagcactatgcaaggttcaggatgcgtaagttatccagattgccattccttgtttttatagagcatttggtctattgggaaataaatattaaacgtgattgtgtttaatcatgtttaatcatgtaaacatgcttgtgtttaacatatacaattttataattgtaataagtgccatgaagaaaatgtccaaggtgcaatgagattaaatgaggaaaaaagtttaatctggttcttaaaggttaagaagagggatgtgaagtgggataataggaaaacaagggacctagcaggaaaattacccatggaaagagcacatgtgaagaacagagaaggccagggtggctggaaattattaccggacagagtttgggagataaggctacagaggtaagaagaagacaaatcatggagagtgtagtgcatcatggaaataatttttgacattatcattaaatcattgtagagcttcagggggagtttaagagggacatgacaatcaatttgcactatttaagaagctggagagaaatctgtgtgtgcatatgtgtatgtgtgtgtgtgagtgtgtgtatttccaggccttgttagctggataaatgataatagaagatgtcattaatgaatccaaattggaacaactggaagaacagggtgtgtattagttcttatattactttaaagaaataccgaggctgggtagtttatgaagaaaagaggtttaattggcttacagttttgcaagctgtgctcaagtgctggcaactgcttctggtgagggcttcaggaagcttaccatcatggtaggaggtgaagcgggagccagtgcctcacatgatgagagcaggagcaagtggaggaggggggacaaggggagctacacacttttaaacaaccacatctcctgtgaactcactcattgccgtggggattggctaagccattcatgaaggatccactctgatgatccagatacctcccagcaggccccaccttcaacactagaggttacatttcatcatgagatttggaggggacaaatattcacaccatatcagggtgttatctactgagatggggaattcaaggcaaaagcagattaggaagagatctgggggaggaaagcgttcagagttcagttctgagcatgttgaactgaagcaggtggtaggtgcactggcacttgactgtctgatcctgaagttccaaaaaagtgcctggactggagataggaacttgaaatcctatcagtaggattgttaggagtacaatgatgaagaataaggttttgaagtcaagtagcctgggacttgactagcgacaacagggtctacaatttactgtgcaaccttaggcaaatcttaccctactgagccagttcctgttttttatgtaatatgcttattgtttgtatagggtttttgtgataagttactgataagctaagatgtgcaaataacttgataaattttattagttttgtaaatagtaatattatttatagagatattatttaaatgtaaaagactgataaacttgcctaaggaaagtacagagcaagaaggtgggcaagccccaatttctaaggagttagtagaagagggtgagtcagaaaagttagctgagagataaatgccagagaaatagaagaaaggagagagaggtgtcatggaaactaagagaagagaaagttctagaaggaggaaggagtccattgaaagcacaaatgaagattaaactgtctcttatttagccacatagagtgaaatgctgacctttcctgaggcaatttcaatagaatggtagggtgcgagattgaatggaggaggaagagaagatggtatgtatctacaactgtttagaacagctcaagatgcaagatgcagtgagagttcattcagatgggagaacctggaacatgtttgatttttgaaggcagtgatctgggagaagagagtaagagagagagaagaaaattgaaaatgcatgtgggtgaggaaatgaggtcagtgaggaggcaaaatggatggagttggtcttagaatgcaggagaggaatgtcctgcactctaattggagagagaagacaatgagtgcagaggcgggggcgggggttgtagttgtggtgatggaaattggtcttcgtttggtatgggcggaagtcaaaggtgaaaaggagtggcaaaggaggtatgacaacagtcactacagaaggcagaacacaccaggagatgcattctgattctgggtagattcacttcaaatctttgcttatccatctgctctgttgtgagtctttttcctagcaggacttagttgtgcagggctgccctcgggaggcttttgttagactctcccaggtttgggattttcttggttgagtgtaatgcaagaacaaaagcacagggaaatgcttggaatttgcaagatttggtgaaacaatggttcctccacttctgagctgtggccaggtaggaaaggttggagaaatgttctgtgaagagacagaatttatttattatgggacaaagttgcagaaggcacagtggaaatatttggaagaaaatgaagccatggaagtctaagacagaaacagcccaagacagcacaggaagaaaggagatggtgatgtggccatgccttgctcagaatgtgacctgtgtgaggttaatccccttcagaattcctataggtggatttggctataactgtgtgtttgtttgttaatgcgtgttgcgatccaggcaattcagaagccacaagtgaaatgagaggctaaatttataggtaaagagataggtgcagaaaagaagcatgtgctcattttcccagaccaaaatatttgctgcatggaatgagaaagaaaacacataattttctatgagaacaggactttgttcctggcatatgcatcactctttctcccagagtgcattgcctggccagcaggtgcccaatgagctattgcgagtaggaaaaatagaacccccccattgtcaccatagctcctaattgctgtgcattctgattctgggtagattcactttaaatccttgcttatccttctactattgctgctgcctccgatctaccctccagattgtgcagccatggggctagatggggttgaatctggaggattgttgggagaggagcggtcttcactacaaaccactcttgaatacccttcccctcctctcctctcatctacctggccaaatccgaacaatcagttaaggcccctcctagttcttatccctttgaaggagggtttctgtgacaacctctacttttagtgttccatttcatagagggtctgtattttatttaaactatttcttatttatgcaaatatagatttcctctcttttttcctattagtgttgcttgtagtaaacattcttgtacatacatttgtaggaccgtacaaagttctgtcaataagaaaaaccccaatagaaagttgctaagtcaaaggatatatggatatttcatttgatacctagtcaaattgctgtccaaaaatttctactccgattatgagaatatgttttcttgcatccttgataacactggatattaattagtaagcttatgaatttgtgccacgctgataggagaaatatggtagcagcttgttgtttaatattttatttgttcaattgaatgggaaacttttctttggccacttttgttgttgttggctgctgtttttttaatatattgctcatttttccatagggtaactactccttattttattgagttacaccagtattttatgcattaaggaaattagtcttctgtcatgtatgtttttccagtttgctactcttcttgcatcaagcaacctgcaggacggtatgatcccatttgtatgtgttcctttttcaaaggtggttgtgtgcttacaagtgcttagaaattttcatgaagcatacataagaaacttaacattagttatcaaaatgtaggcagagagggtgattaacttttcactctacaccagtcagtactatcatttatacatactcaaactgtattgtttttgtaattataaaggccatgtctcattctctctctctctctggatattttaaaagaatgaaccagaaccacacaatttggaaacagagatatacagtggccttctctgcttcttcaccacctctcttcttgttgctttaagctcccaagttgctcgttgggagctcttttgagatgggagaaccatagtaaaattcttctgtgggccacgctaatgttaatgggtaacatttggggcaaaggtctcctccgtctccacatctgcagctttgtacaggcctcacctctgaaatgcctgaaagtgtgaagccaggcaaggcctaatgtgtattagcaagacaaagagcccacgaagggaggagcgggggatgagctttaatttactgaagatttattagacctcatgaaatctgcccgaaccacccattttctatctcatctgcccacgtctaaataggatggctttgttagtatgcgatggtcatttagaattatccagcaacaaatcttgctgcttaaaaaggcagaccgatgggagcagaacgtttgagagagttcatgctctgaacacagaaccccaaatctggaaatatggaaatgtgggaatgtgttggccccgctttctgggccttccccttgacttttgtttttggtctgagtccttcagcttcagcgtggcttgtttacttgagcatatgaagaaagcttgagaggagaaaaggcaaaggtgctttcacagagcagcctggatattttaaaccagggtgattttcagagaaatacgttgaagttctgctttttggataaatgctgctcaaacctgaagactcaatggagcatatccaataatactttaaagctcagctcacgagcaggagatctctctggggctatacaaatgtcaaaatactgtctccttaatttgaaggaaaggtgaaaattattgggacttggttttccgtttagccttaggcttgcagctcattcatagggtgttagaaaattcacctggattgtattaccagaaacttcccctcgggttgcctaactttgcaggtctcacaagtctctatttgctcatctatggaatgggtcgatatggaaagcttcatgaaaaagtaagacacctgaaagaaatgtgagggcttactaatttcttttattattattattattattatactttaagttctaggatacaggtgcagaacatgcaggtttgtcacataggtatacacgtgccatggtagtttgctgcacccatcaacgtcatcaacattaggtacttctcctaatgctatccctcccctagtcccccaccccctgactggccctggtgtgtgatgttccccttcctgtgcccatgtgttctcattgttcaactcccacttacgagtgagaacgtgtggtgtttggttttcttcttcctgtgttagtttgctgagaatgatggtttacagcttcatccatgtccctgcaaaggacatgaacttgtccttttttatggctgcatagtattccatggtgtatatgtgccacattttcttaatccagtctatcattgatgggcatttgggttggttccaagtctttgctgttgtgaatagtgctgcaagaaacatagctgtgcatgtgtctttatagtagaatgactcataatcctttgggtttatacccagtaatgggattgctgggccaaatggtatttctggttctagatccttgaggaatcgccacactgtttttcacaatggttgaactaacttacactcccaccaacagtgtaaaagcgttcctgtttttccacatcctttccagcatctgttgtttgctgactttttaatgatcatcgttctaactggcatgagatggtatctcattgtggttttgatttgcatttctctaatgaccaatgataagctttttttcatatgtttgttggccacataaatgtcttcttttgagaagtgtctgttcatatccttcacccactttttgatggggttgttttttttcttgtaaatttgttcaacttccttgtagattctggatattagacctttatcaaatggatagattgcaaacattttttcccattctgtaggttgcctgttcactctgataatagtttcttttgctgtgcagaagctctttagtttaattagatcccatttgttgattttggcttttgttgccattgctttttgtgttttcgtcatgaagccttgtccatgcctatgtcctgaatggtattgcctaggttttcttctaggatttttatagttttaggtcttatcgaatccagcagcacatcaaaaacttatccatcatgatcaagttggcttcatccctgggatgcaaggctggttcaacatatgcaaatcaataaacataatccatcacataaacttaaccagtgacaaaactcacatgattttctcaatagatgcagaaaaggcatttgataaaattcaataccccttcacgctaaaaactcccgataaactaggtattgatggaacatgtctcaagaataagagctatttataacaaacccacagccagtatcatactgaatgggcaaaagctggaagcattccctttcaaaactggcacaaaacaaggatgccctctctccactcctattcaacacagtattggaagttctggccagggcaatcaggcaagagaaagaaagggtattcaaataggaagagaggaagtcaaattgtccctgtttgtagatgacatgattgtatatttagaaaacctcatcgtctcagcccaaaatctccttaggctgatgagcaacttcagcgaagtctcaagattcaaaatcaatatgcaaaaatcacaagcactcctatacgccagtaatagacaaacagagagccaaatcatgagtgaactcccattcacaattgcttctaagagaataaatacctaggaatccaacttacaagggatgtgaaggaccttttcaaggagaactacaaaccactgctcaaagaaataagagaagacacaaacaaatggaaaaacattccatgctcatgggtaggaagaatcaatatgaaaatggccatattgcccaaagtaatctacagattcaatgttatccccatcaagctaccattgactttctgcatggaattagaaaaaattactttaaatttcatatggaaccaaaaaagagcatgaatagccaagacaatcctaagcaaaaagaacaaaactggaggcatcaggccacctgacttcaaactatattacaaggctacagtaaccaaaacacggtactggtaccaaaacagatatatagaccaacggaacagaacagaggcctcagaaataatgccacacatctacaactgtctgatctttgacaaacctgacaaaaacaagcaatggggaaacgattccctatttaataaatggtgttgggaaaactggctagccatatgcagaaaactgaaactggaccccttccttacaccttatacaaaaattaactcaagatgaattaagggcttaatagttttccctgaggaggatgatctcactccacttaactgaacgttggaatttaaaggaagttaagggagggctttgtccaccttaataaaattctcttctgtggccattgctgctgtaatgtgaaaagaacacattcctatatttaacgaggagagggatgaatcattccttctgctggtcttaaaagtagtaagtaggactaatgaaatatagtcagacaagagggtggacatagtaggaatatccacagttgggcccttaaaatgaacactaggtcagtggctgaaaaggaacatatgcagacatgataatatgccaagggcactgcattcttgacctttgataaggaatttggagaaagcaggaagacggcaaagactctgctttaagccatgcttggaaattctggtgactttttagggccaaaagtgaatagctttaaagcaacattcaagctatttgttttcccctcaatgtaataatctgtttgactgtcggttatagatgtacatcagtcttcatctgtcattgccaaaatctccttgtacacaatgggacagttctcaattaatgcaaattaaaccacagttgtcttgtctgtaattgtctaaactagcaatatgcctttctttgttgaaaagagccatccaaaactccttgctctgtctaccccgagggccccgtgcatgttccatgctttatctctttcttgtggcttttatccacacaacattaaagggactctctttcctttatgcaggcaaataaaaagtagagaacaaagatgaaaagaattcattctgctgatgatgtacttcagaatccagcagcctggttttcagacattggccaagttaaaagttgcactgggttcctttacatcagaagttcagatgaaaaaatgaaatcaagcatgtgcccgtaagaacttgtagtacattaaaatgaagttatgtcattggcagctcttgaaaagggatttccaaggcctgccttttagccttggttaatggggaagaagagctcaagagccacaggtttgccatttgccctctcaatctgtttccatttaaagaatattttctctgaagcttaaagcaggtaatagagcctgaactgcatcattacctctaaaagatcaacttccccgcaagctaagcatttctcactaggcatgttccatgggaaacttttcaggggcttgagccatttttcccaagcagataatcttcagacaagtcatagttaaaatccacttagctctccaaatgagaaacatcagaagggagaggagctaaattctttccaaaacatgcccaatttcagaagagaactacctggaagagagatcatgggtctgtttcaaggttgtttcgggcaactagctttgtgtcagaggggccctttggagcataatcattgtgtactctcacactgtaaacagaactggagctgctcctttgttaccaagtaagttgacacacctggattcagatgacatatctaccctagcctcatttttgtcttacacacaatttgattgaaactatcttcctcattattatccccataaccacaggccctacattcccttaaagtgattgttagacaatgcagatcactctagcctttgttctaatgcacatactcttctgctctactcctggtcacctctcctgcccattcaacctgtagttcattccagagccaatctgctccatgtcctcccttcatacattccatgtggtctcaagctacaaattaaactcaactatccttggttgtgaacccctactcaggcacttactaaccctggaaagccatgatgcattgagactactactgcctcaggctcctcctccagaatcccaggtgacagagacacagccacctgctctgaagcccactgcagtgggtagagcatggatttaggtgccagagaattctgggtttaaatcctatgtctgtcacttaccagtttctgtgctttattttttccatgtgttacacaaaatggataggaataaaaagaaataaaagaggatctgacgtattttggtagccatctcccaagatggccctcaataatcacctcctggtgttcacgtttttgtgaggtgtccttctacactcaatcacagctagtcttgtgaggccaagactagccttctcttatcagagtagattatgaaaggcattgcagtttctgccttctcgtcttggatacaggccatgtcatgaaaacactcaagcagccctatgaaaacattcaaatggggaggaccctgaagcctcccaccaaaatcctttaccaaagtgtcagctttgtaagtgagttgccttggaaaagagtcctccagccccagttaagcctttggatgactgtaaccctagctgacatcaaactgcaataacaaaagagatcccaagccagaactacccagccaagctgctcctgaactcatgattgcatgttacaataaatgtttctcattgttttaagccactaagttttgggatcatttattatacagcaataaataactaatacacaagtggtggatgctcagatgtttgtttcatttcttctcgaattagaaagttgaaatctgccctttaccttcccaaacatgctatttcttacattagcccactacctcagggttaaaaaaattattcctagctatatgttgtacagtctctcctgtataagaatcctttcaaaaggtgtggcacatgaatcactttttaaaatctgccttacctgtgttccccataacctaagggccatgatacaatatctatttatgcagtgagaatcttctataaaagtaaaccattacacaggaagtgggagaagaggcccagagaccatttgtggatagaagatacatgttaacagttgttgcacttcagttattctctgcttttgtttcaaaaataactatgaaggtcattgaattctccactaagtatgcctgaaactttgaagaactggtattaattataagacagaaagaagtggattaagaaaagttctactcagacttcagctcatggttgaactttcaatcatgaaaacaagaggtcacggaaaatggtagaaggtaccttgaatcgggacaggtgatgagtgagtattgaccaaaacatggggcaactggcctcctctgttttctggtgctgctccctgggactatcaaaatacggtagttttctgcctcgcttccctcttctcccccgatctgctactcccaccttctagccctgatgcacttctacaaccagacagagattgaggatcccacaaaacatttaggaataaagcagaagctgcaaaataggcaactcccagtgcctacagagaagaaaagagcttcaagtcaagtggtaggggaagagataggaaggactgtggtggagatgcctgctgataattggcctatgttagatcagagaagaagaggaccatgtaatgagaaaagaggaagatgtgtcctcctgaaggtgcagggatacactagatcctgttataaactgggggctggacttgaagccatgcacaacctgccttcctacctctgactttgagaagcagattcagtcactgggcaagtgaaggtaagaagggttgcagggccaagtgcaagccacttatcctgactggttagcagagttcacataacagtttggacaaagatgaagaaaagagaaaatcacaccacagatagaaattggaatggcatttgaggttttaaagcaatggtatgccgaggaagataatatatcttagatttcaaagcacagggagccatggcctctctgaaacaagaactgagagtcatgaggagaggaaaggctgacatcaaaaggccaactggctgaaacataaatgtcagatttggaaaagcattggctacacatggcaaggggctgataatctcttataggaagagttcacaccaatataaaaagaggtcacaggaataattatataaagggtataaatagtaggccatttgccagtcatcagagaaaagaaaatctgaatatgaaggctattactttggctaatgagattggcaaatacttgagaagtccactgcaggctaaggtttgagtaaccaaagctcttacatgtactgctgttgagaatgtaaaatataatttttctgcaggacaactggcaacatgtactttaaacgtatttataatgtttgtaaattttgacccaaaagttctagtgctagaaaattatgctaataagtataagagaatggataaattatggtacatctatacagtagaaaatttgaagcctcctcatattgagaatatgtttttgcctacatgctaatctaatggtgaaatttaaagaactaaatagggtacaggccttttcacgtattgatttgtgcacgcataaataggttctagaattatatatattaaaattctaacagtgggattctggggtaacagcaatactggcgattttagtcttgttctttcaatccaatattatctaactttttctataatcagcatttattgcttttgcaactcaacaagtattttatatttaggttttcactgcctgcaattatctatcttcattcttcatatctatctatcttagtgaaaattacctttatgcattgatgtaataagtactatggaaaatagtgccatcagtcaaaatgtgaagacataactatgacaattactactgtaaactatgtgcagacatccagtgtgaggatcatttcactgatagaaacatctatgagagattgctaggaatctctgtttatggaaactgtaattggctttatgaaaaaaactgtcatacaaccattgacaagacctcattcaccagtaaagcatagtagatgcattattgtacctgcactctacatttgagattctttctaatttatagtacgggtaaaaatctctttcaatggaagtttttctagtcagcagtggttttcaatttatactcagaaataagatttttagcatttaaaatatatctctggataaagaagaattatttagtcagtagtaatatgaaagagatatcattttatattattgaaatggaatgttttgagatgatttttgaaagccattccatcttccagacatgcttgtatgcacatacttgaaagctccatcccaattttcggcacgttataggtgatcaatacatagcagttgaaaaaatgagggagcaggcctgggcatggtggcttacacctgtaatcccagcacttcaggaggctgaggcaggtggatcacttgagcctaggagtttgagacaacctgggcaacatagtgagaccaaaaaaataaataaaaattagctaggtattatggcatatgcctgtagtcttagctactggggaggctgaggtaggaggatcacttgagcctgggaagttgaggctacagtgagccgtgatcacaccactgcactccagcttgggcaacagagcgagaccctgtctcaaacaaacaaaaaatagggagcagagtcaagcaagccacatcatgctgacatgctcatttattcctccccaaatagaatgcaactcatttttctctctgtaccccttcccctgccactttcttactctgacattcaaagcttcttcacacaaagtttttttgttactgtgtgaattcaaaataataggtggaaacaaccctattctacgattttagaaaactttcttttgatacccagaagccctatctgaccttgaacaaatcatttaaaattctaagtttctacatcagaagaataggaaaaattcctgctctttttttcctcaccatattattgtgagaatttaagataacacaagtaaaatgctttgtgttataaagcccaggtaacttttattggttccaggaatttgtgccatttacgatgttctttttgcctgatcagatctgttaacaaccttgccagtgcctccacctatagtgctttagtgctcttgtaatcccattgcacagaatgaggtgagtcagggctagcattcacactgaaatctgcaaggattatagactccacattttaccctgggctacctacccaagaacctttaaactcttcctcttctcccctgtcccttatagatgtctttagctatgtcaaagaggcagacagtgcaaagcccatcactcaagaaacctctccacaaccagagctgctgcacctccttgttttgttcggttggatgcattgttaaaggttgatttgtttgcagttcagacaatgggtaccaccatcaaaagcagcagattcaagtcagcaaatgtttgagcaagcagggcattatccaatcagccttacctatttgggattcaagcttgaaaggcccctcagaaagacaataaacagtttccttgacacatcgaatgaagtccaaaccaaacaaattcctcgctaggcaagatctggagtctgacactttttctttgattgggacatacaaaaaaaagtgtcctcatgattggtaccgaaaaaataacggattcctttctcattgggcccaccttttcctaaatgtcatttagttcgtttttatctatttatgaacttttattccttttgctgttaaaaatgaacaacaaagtaataatgcaccatcaagaggaaaaactaagttcgcactctggcttctcatacgtgtgcaagtgtataaaaccatgttttcagatggattttaaaatggtcatggagctcttctttgaatatcaatattcacgtgctgtgttttcatagttccttggtatttatatgacggctctctaatgttttaaagcaattcattttgtcaggaatgtaagtggtttccaaatttccactctccaaaccgcactgcacggcagtgaacattcctataactaaatctatgctcatgtccttacagttaaatttcctgcactggaattactgggttaggataagaacattttcaagactgttgaaatatttgccacactttcctctagataagttgttccgattttcgccccattggcaatacgtactctttgaagtattatactgttgaaaatatgtgtcaaataaatgaattctcaatgtttacatttaaatatttttattactaatgaaggggagcgtcttggcacatactggcatactggtctttctgtgtttgggtggatgtgagtttactgctcatccatcccggcccgtttttactgggtgatcttttaattcatttgcaggggtctttgcatactaataatattagctctgcatctgattgtgttgcaaatatattcatgttattttgaattgcttttgaattgtcatggttgttgtggttttaatgttgtcaaatgaatgtctttttcctcatgagtttcctcaactgagagtcaaagcccctgttttggagaaagcgctagatgtgcagggaagtggttggccacttggagactgtcccagcattgacatggcggccccataacctttgctctcaggtctgtggtgcagctgtatctgtagcaggaagagggtctccagacagggttattcctactcctgctcttgctgccagaacactagtgcctccaaattagaaggtgttggtggccttctgccaagattttctttacttatttccctaggtactacacttctttctcacaaaaaattattacttagttttagtgaattcattaaatgtgttatctgcactgtgttttatagaaaattcctcaaagtttgaggcatgtctatgacacatctctctagttttagtgcgattcaggtttcatgctatttaactcacctttgaccatgtcaaacaggtgccacttctcatggctccatctttccctggacatcatattataattacgctatccattataagtgcgttttccccattgtttcctctctttatatatggctgatatattgattggatagatattggcatttcattttttcacaggcaatcttactgaaatcttactttggcactttcctacttggcccttagattacctgggtggacaatgagagcatctgaaaataatactttgttcatttttccagtatttgcaagtttttgttttcatgtataattgcgtttgttgagattttcacaatattgaataatggctataataggaaaaataatgagcacccaatttttaatagaaatgcctctagtgctaagtaaaatgcttattttacattttctatgtcaaccttgaggtgctactggtactagtgagcaggggccagaaatgcattagatactgcaatgtttttaactattgtaaatggaaattttgccaaatgttttcttatcatcaagagatgatcgttaagtcttcaggcatttctcttctgcttataaaagataatactaatagatcttcatatattgagctctcctagcattcctactcatgatgtattattcttttaaaacactactcaatgtaatttttcagctggtttgtgaaaatttttcataccgtgccacatacaaatttagttgcactctttatacaccttcagatcttaaccctaccagtagcctgcgtatctctgtattgaggtcatcatgtcatttaaacaaatctctcaaactgggttcaaaggaaactcaatgataaaacaaatattgaattaaaatttttttaacacatttcagtcaacacaaaaaaatttgactcaatactacttcatgataaaaatactcaacaaactgggaatagaaggaaagttcttcaacctgataaagagaatctataaaagattcgcagctaacctcacacttaaaaatcaggaaaggagaatgtccattctcaccacttctatttaacattgtattggataggctaatcggagcatattaggcaagaaaatgaaatagaagacatccagattggaagagaggaaataaaactatctctatttgcagatgaaatgattttctatataaaaatcaccaaggaatccatttaaaaattgattagaactaatatatgagctcagcaaggttgcagaatgcaagatcaatatgtaaaaagtaattgtatttctatacagtagcaatgaataaactgaaattgaaattaagaaagtgattcaggctgggtgtggtggctcacacctgcaatcctaccacttttggagccagagacaggtggatcacatgaggtcaagagttcgagacaagcctatccaacatggcgaaaccccatctctactaaaaaaaataataaatcagccaggcatggtggtgcatgcctgtaattcgtgctactggcggggctggggcacaagagtcgcttaaaccaaggagatggaggtcgcagtgagccaagatcattccgctgcactccagcctgggcgacagagtgagaccctgttcccccacccaaacgccaaaaaaaaaaaaagattaagaaagtgattcaatgtatgcataaaataatacaatacctagaaataaatttaacaaaagaagtgcaaaacattgttgtaatctataaaaaatgtcaaaacattgaaaactaagtagacaccccatcctcataaatcagatttgtcattgttaagatgacagtacttctgaaattgacccacagattcaacataatccttatcaaaatcccagttggcttgcttacagaaattgatgaactggtccaaaaattcatttggaaattcaggagacccagaatagtcagacatctttaagaaagaaaaaagttacggtactcacacttcccaactttaaaacttaactacaaagctaaagtaatcaagatagtgggtactgacataaggacatagatcaatgaaatagaatggagaatcaagaaactaactatcacatttctggttaattgatttttgacaatggcaccaaggcaatttaatgggggaaagaagagtctctttatccaatgcagctgggataactgaatatgtaaaactatgaagttggacccatacctcataccacatacaataataaacccaaaatgaatcaaagacctatatgtaagagaagaaactacaaaacatgtagaagaaacagatgtgaatcttcatgtcattgaattaggcgattaaaaaaaaaaaaacccaaagcaaaagcaacaaaagaaaaaaataaataaactgggccaggcgtggtggcttatgcctgtaatcccaacactttaggaggttgaggcgggcagatcacctgaggtcaggagttcgagaacagcctggccaacatagtgaaaccctgtctctactgaaaatacaaaaaaaattagccagaagtggtggtgggcacctgtaatcccagctactcgggaggctgaggcaggagaatcacttgaacccgggaggcggaggttgcagcgaaccgagatcgcaccactgccctccagcctgggcaacagagtgagactccatctaaaaattaaataaataaataaactagacatcatcaaaattaagaactttcacgcttcaaaggacatcatgaagaaagtgaaaagacaacagaatgacagaaaattgcaaatcatatacggctgacttttgagcaacaaaagggttaggggtaccaaccctcaacacagttgaaaatccacattcaactctgaacctccaaaaacttaacttctcatctcctactgttggcctgaagacttactaataacatgaacagttgattaacacacattttgtatgttgtatgtattatatactgcattcttataatacagtaagctagaaaaaagaaaatgttatttaaaaatcatgaggaagagaaaatatagttactattaaggggaaatggatcatcataaaggtcttcatccttgtcttcatgtagagtaggctaaggaggagggagggggaagaggaggagttggtcgtgcagtctcaaggaggacagagatggaaggaaatccacatgtaagtggacctacatagttcaaacctgggttgttcaagggtcaactgtatataataaggaacttgtctctagaatatataaataattcctacaacacaaggataataacagatctccaaaaatagaaaaagatctgaatagagatttctcaaaaaagatatatgaatggtcaataagcacatgaaaagatgctcaacctcattagtaatcagggaaatgcaaatctaaatcacagtctaatacgcactagcatgactttaataaaaaagatattaacaagtgttggtgaggatgtgaagaaatttaaagaaactcttgcattcattgctgatggtgatgtaacatcttgcacctgctttggaaaagagtctagtagttctttaaaaggctaaatgtaaagtctccatatgacccagcaattgcactgctagctatatatacaagagaaataatatcacatctgctattttattggctaaagcaagtcagacatagccaaactcaaccttaagagggcagggaaaggcatactgcctcacagcaagaagaaaaaacggatatttcgtggaccacactgatacctactattatctgctcttcttcccacaaaatattctttcacaaacagaacacaccttctcttcacaggaaacaaaattcactgcatccaccatggtgtctggtgtctggaatctctaagtgatattcacaatctctctattaggactgaaggtgattcctcttggtctagagccctttgaaattaaaagacaaattatctccacacatactcaatataaaatagtgaaatagggagaatgagaaaaaaaaaagagcaatcaccactcgatggcaattctgaaatctccctgggaaatcattgcggagacctctcccctgaggttatagaccatttctgcatttctcactgagctgtctactggtttggagcccttagaacccttggaacaattctcttcttctgagaagttctcccttttcttgtcccactgtgaccacttctaaacaggacatcagaataccacctcttgatcatagttggggtcccaagcttgtttgaaatcactgtcttattcagtgatgtaattctcttcaaaacttagccaacatttccatttgattaaagttgatagcacctgccaatactccttcccaacatactcttggatttgctatattgccttgcttttttgctctctgttcttctttctccatcttctttttaatcctctctttttgactgtgtccctgtttttttccctccttctctctctcccttcctccctcccccagccttctttcttgctcgcttgctggcttccttttcttcttttcctcccttctttctgtctttgtagttatgtgcaatgaatttgtatagatttccaagttcttaacaatctgggtcacaggcctaaccattccccagaacttacaaaactctacgcaggtttgtcaaccattactgaaatccaggaccaaatatactaaaaaagattgggaacattccaaataaaaaaaaaaatctatgaaatagaagttgtaatgatgtgtccatttagggaagagtgactcatagcttatgcaatatatttttaagtaattttccctttgctatcttaccaactggaattcatagaacttagagtagatttaataaatagtttaaagttaagtcctgtgctgctttgaatttggtgaaatttaaaattaactttattccttggattttattcccattaaacgactctaaacatatttaagcttctcccaggctttagttgaaggcaagaaatcttaatgtaatccataaaaccttccttggctgaactcacctttcttgtcttatctcaatccacactttcttacatgctatttctgtaatctagccacagtgtctttttgtagttgcacaagcatgacatgttccatctgaactcaggatgtatatgtgacggtccctctacatgaacctatcttccgccttcaaatcctttccttagctgacttgagttcttcttctttgagctccctgtgttaagtggcacattttgaagctgtcttttctgacctgcctgttatggcccactcctcccttctatgccatcactaataccttccgctactctttcagattactcatgggcgttctaagttcttatttatttgtgggctcgtttgctcagcattatctctacaaccagattctaagctttgcaaaggaagagatcataccttattctgtatcccagatacttagaaagtttatggtccacaataggcacttaaagatttgttgaaacaaagcagaaacctaggtaatttcacaacataagaacagaatcaatgattttcatttttctaagttttagtgtctggcattgtggaaataaaacagatttgattattttcagttaataatttagccatttggggctttattttgtttttattgctttagcctatacaaagataaatacctagtgtgataaatattttcttgaatttagtaataaaatatcttcttgatattttgcttgtgaatcttttactcattgaacaggtattgtgatgtcttattgactcaaattattatttttcaaaaatttgtatcatttaaagagttttataaggtagtaaaagataaatttttcattttgacttgaattctcataaatatttagtcctattcttgattttgcttctttacaaatgtatatttattcataaaaaatatacatataactgtccttcacttcagaaacaaaactgcttgttggtagaaccctaatgaaaagaaaagggaaagggaaatatttaaaggaaagttcagatgcagctggaatagccataaattggaagccaaaatccttacagctgattcttgaaaaatggtatctaatctatgagacttaaattattacaaaattaaaattttttttaattttgtcaacactttttggacacttatctactcattttatggtagatagtcatcataagatttgatgagaagaatagatttttttaaaaaaagtctgttcctctttgcctgctctacgtaagtattaatatgccagccaaagccaccagatagcagaaaaccataaactgtgactccaggttcatatgccacaaatgagaaaaggcatgtgacagtgtgtgcctggtgttgacacataattggcattctgatttgtacattcgcttctaccctcagttggggatgggagtggaagcaaattcacctccattcatagagctacaaacaaattctctccaggatttatgtctgtgtaccaaccctttccccaaccatgttctgccccatgtctaccttcgcagccttgcatgctttacctactcatcgttcccattgaatgcattttggtgccataatatagtctcattaattatccctaaatcaaatatgaacctttagctttaagagtcacattgccataaggtaaattttgggaaaagtgctgtttaagaaaactctatgctcaactgtcagcataaaccttgaccgaggtcactagctgttctggccagatggcagtgaggacgtgagacccgactatttcagtcctccaataaaaaggataataaagtgaatgtgtggtgagaaaaatgcttttatggaaacttgtgtaattcaaactttttggtggtggtttaacatcagattttacaacagggtagttaaatagttggctgaattttttaaaggtctggggaatttaatggcagaatgtatactctttgtagttttgtcagttcagagaagtaggcaggcagatatgatatttcggattcaagttgctcggctgtgggatctatggctttctttctctgtataatcttcaagtttgtgatctgctgtgccttaaagagtgagatgagtagcacattgttaggatgtgctgctggttttctgagagaggaattagtcctgagtcctccatacactggctgcatcatttgcagtaataaatttggacaggcttatgctatcatctgcaaatgagattgtctgtgaacagaatgaagctcaaaaccacgatcctcattgttcagtgtcaaaaccaacggagattttttttttttttgagacagagtttcgctcttattgcccaggctggagtgcaatggcttgatctcagctcaccgcaacctgcgcttcctgggttcaggtgattctcccgcctcagcctcccgagtagctgagattacaggcatgtgccaccacgcccagctaatttttgtatttttagcagagatgaggtttctccatgttggtcaggctggtctcaaagtcccaacctcaggtgatccgtctgcctcggtctcccaaagtgctgggattacaggcatgagccaccgcacccggcccaaaacaagttgagcttcttaaagacaacctttattaatgattagctcagagggcctcttccttggtccctcagagagtccttagtccctttcttggaccttctggacaataaaaaggagagcgtgataggatgtttgactatacctttctcagaaaagggcgagcatttagcaatccagataaaaatatccatgagataaagaccacatctataccctgtgattatcattactagaacatcacttctgggttaaagagaaaaaagaaatagaataatggtctggctaaagagaaaaaaagaaataggataatggtccttaaaataaatgaggtaattttgtttatgtctagcattctacaacaaacatttttcattgcactgtatttctgtgttctttcttgcttcagtaacttggtgcaactacaagattactgtttgtagttctgtgaactaggtaattccagtttagaaaacaaagaatgacgcatcatatttagagacaatgctactgtctacttttagagaagtagaatttatgctctaagttaattattctgaagtggagagattgatctcctcttgtttctttgtagtctcataattttttgttaaaaaatgaacatttttaataatatgtgaaaactcgaaatcagattctaccccttctacagagtttgctgtttatgctgtttattgttcctgctgcttattggtttagtgacctctctgaactaactcttcaaagtctgtattctttgttgtgtgtggccattcaaatctgtgtttggttagcttagtagtcagtcaatgattggaccgacatttttttttaatgccagtaacaagtaagtctcccagtctttgttgagaaactgtgtgttggggcacgcctttaacactcagccatgcaattttgacagccctgccttagtcttcactttttgctaatgcagagcctcaaggtcagccagaggtgaggatttaaggccttcttgggcctttctaagcatgtgtacagtcctgggtttacacacagccctgcatgtgcacatggccttccagagtcccagaatatgttggagcttttcaaagccccctgggtgtctcataccccagcttttccttttaagttttctgccaatccattgtttgtccaaacagtatccatttcttcaggcagctgtgatgtttaacaattaactctgattgattttggcaaatgccctaagtctgttcacattaagtgaccttgaggttagtgcaagaaagataaacctggtaggtgaggtcttccaggaaaccatccgacaggtcaaataacaattctcaaactgcaactctgaaggagttcctactgcattctactccttcctggggctgtgattgcggagggttgattttgtcctatgtgaaactacaggcaatctcaagaggagaggagggaatgggactacatattattaaaataaaataacacaaagctcattgtttttaccaagacgtgtgtgtgtgtgtgtgtgtgtgtgtgtgtgtgtgtgtgtgtgtgagactctttggattgctgcaagcaagcctttggttaatttccagagttttgaaaaaactgattctgagcatttttgccagttttcttattgcttttatgagtgagatggttttcagaggtccttacttctccattcccattgactttacttagtattttgatcatttttaggttttcttattattattgctgagttgtaagaattctctataaattctgggtcaaagccctttgccagatatatgagttgcaaatatttcctctaagagtatggcttgctttttaattctcttgggtgtatcatttaaacaacaaaagttttcacatttatggtcaatattttttgtatcctagaaaatcctttcttgtcccaggtttgcaagagttcctcccatctgtgtttctgggaatgttacagttttggtttttacattaggtctgtaattcacttcaagtaattttgtaagatgtgaggtagaaggcatggcttatcctttttaaaatagatatccagttttaacaccatttttaaaacccaaaaatcagtaacattgagaataaaatacctgggaataaatttaaccaaaacggtaaaagacttgtacattgacaaataaaaaactttgctgaaaaaaattaaataagaccaaaataaatggaaagataccccaatgttgacaggcaggaagacttaacacagttaagatgtcagtattactcaaagcaacctatagattaatgcaatctctttatttatttatttatttattttattttgagatggggtttcactgtgttgcccaggctggagtgcagtggctcgatctcagctcactgcagcctccatctcctgggttcaagtgattctcctgcctcagcctcccggataactgggattacaggcacccgccactgcgcccagctaatttttgtatttttagtagagatggggtttcaccatcttggccaggctggtctcgagctcctgaccttgttatccacccgcctcggcctcccaaagtgccaggattacaggcatgagccaccccacccagcccttaatgccatctctagcagcagtttttttgcagagatggaaaagacaatcctcatatacataaagaattacaaggggtgctctgtagccgaacagtcttgaaaaggaacaaaattaaagtacttacacttttcaacatcaaagcttattaaaagctttacattcatcaaaacagtgtggacaaggagaaaaatggaatagattaaaaatccagaaataacacacatatcaatggacgaccgatttttcaacaagggtgccaggaccaacaaatgggaaaagaatagtaccttcaaaagtcggtgctaatacatttggatttctatgtgcaaaaataaaataaaataaaattagattcctacctcaacatcatatataaaaattaactcaaaatggatgaatggcctaaatttaaaaagctaaaatcataaaattcttggaagacagcgtagaagtaaatctttatgatcttggatttggtgatggattcttggatatgacatcaaaagcacagacgacaaaagaaatatgggtaaatttatcctcatcaaagttaaaaacttctgtgtatcaaaagtcattatcaagaaagtgataagacaaactacagaatggaagagtatattttcaagtcattcatataaggaaattatgtctaaaatatataaatgacacaactcaataataaagaggtaaataacccaaataaaaaataagcaacacatagaaataaaaatttcttcaaagaagattctcgaatgaccaaaaaaagacaagaaaaagtgttcaacatcataggtcatcagagaaatgcatatcaaaaccacagtgagatagcccttcactcttataagaatggctataattgaaaagtcagatgataacacgtgtgggtgagaatgtggagaaattgaaaccttcatacaatgctggtgggaatataaaatggtccagccactgtggaaaacagttctgcagttcctcaaaaggcgaaacacataatgtcatatgacctagcaaatcaactcctaggtatatacccagtgtttttgaaaggagggacttgaatggatgcatgtatgcccatgttaattgcagcattattcacaatagccaaaaggtagaaacaacccaggtgataaacacatgaatggataaacaaaatgttatctctacatataacggaagattactgtattttataaaaagaaataaagttctgaaacatgctacaacatgcataaactttgacaacattatgccaagtgaaataaaacacaaaaggaaaattattgtacggttctacttacatgaactatctagcatagtagattagaggctgtgaaggagctagggatgaaggggagtgaggcgttattgcttgattgtgacagacttatgtgtggatgattaaaaagtttttatgtagatagtgatgaagactacacaagattgtgaatataattaatgccactaaattgtacacttaaggatggttaaaatggcaaatcttgttatatattactataatttttaaaggttaataatgcgatatagcacaatcgttgaattgtatactttaagtgggtggattttatggtatgtgaattatatttcaataaagctgttaacaaattataaaatacggatttttgtcatgtcaaagatgaaaacaaattacattgaaacgtgtcaagttattctataagtgaaaatctgtttctggattctagttccaattttctgtatttctattactccaacattttttgttgaatattattgctaaagatttttattttaccaatatttgtaataaatcaacttttgcctttgttgttttcttcatttttttatttttatttttattttttttgagatagagtttcactcttgtcacccaggctggagtgcagtggcgtgatctcagcttatttcaacgtctgcctcccgggttcaagcgatcctcctgcctcagcctcccaaatagctgggattacaggcacccatcaccacgcccagctaatttttgcatttttagtagaaacagggtttcaccatgttggccaggctggccttgaactcctgacctcaggtgatccgcctgccttggcctcccaaagtgctgggattacaggcatgagccaccgcacctggctgttttctttatttttcgtctgagattatttgggttttgcttgctcagttgtttaagttacttatagattctggatattaggattatgtcaggtacatagtttgtgaatactttctcccattctatggttgtctgtttactctattggcagatttttttttcctgtgctccaactcatcaatttttgttttcattgcaattgcttttgaggatttagtcataaattctttcccaaggctgatatccagaatgatgtttcctaagctttcttctaggattatgatagtttgaggtcttacatttaaatctttaatccatcttgcattaatttttatatatggtgaaaggtaggatctagtttaattcttccgtatatggctagccagctgtcacagcaccatttattgagtagaaagtcctttccttgttttccattttttttattttgtcaaagatcagatggctatagatgtgtgtgtggctttatgtccgggttctctattctgttccatttgtctgtctgtctgtctttataccaatacaatgctattttggttactgtagcccaatagtttagtttgaagttgggtaatggtttgaagtcaggtaatgtgatgtctccagctttgttctctttgcttagcatttctttggctattcaggccctttttggctccatatgaattttaggatagaattttctagttctttgaaaaatcacattggtagtttggtaggaatagcattaaatctgtagattgctttgggcagtgtggccattttaacaatattagttcttccaattcagaagcatgaaatgttttcccattttttgtgtcatctatgattttttcatcagtgtttcatagttctccttgcagagatcttttacctcctgggttggatgtatttctaggtattttattttttgtggctattgtaaatgggattgcattcttgatttggctctcagcttgaatgttgttggtgtatagaaatgctactgatttttgtacattaattttgtaacctgaaactttactgaagtcagttatcagattcaggagccctttggtggagtctttaggttccttttaggtatagaatcatattgtctgtgaagagagatagtttgacttcttcctttcctatttgtatgtcttttatttctttctcttgcctgatggctctggatagcacttccagtactatgttgagtaggaatggtgagagtggcattcttgtcttgttccaattctcaagggtaatgcttccagcttttgcctattcaatatgattttggctgtgggtttgtcatagatggctcttattatttaggtactttcaatgcctggtttcttgagtttttgttgtgaagagatgctggattttatcaaaaacttttctttatcttttgagataatcacttttttgtttttaattctatttatgtaatgaatcacatatattgatatgcatatgttgaatcaatcttgtatcccaggaatgaagtttacttgatcatggtgaattaactttttgatgttttgttgaatttggtttgctagtattttgtgtaggattcgtatgtctacttcatgagggaatattggcctgtagttttcttttttcattgtatctttgccaggttttggtattagggtgatgctgaccttgtaaaatgagttagggcaggagtccctcctcctcttccttgagtttttggaataatttcagtagaattggtaccagctcatctttgtgtgtctggtagaattcagctgtgagtccatctggtccgggtcttttttttggcttgggagattttttttttattattattactgattgaatttcagaacttgatattggccagttcagagttacaatttcttcctgattcaatcttgggagattttgtggttctaggaatttgtcaaattcctctagatttcatagtttgtgtggcatagaggtgtttataatagtctctgaggatcatttgtatttctgtaggatcagttgtaatgtcacctttgttgtttctgatggtgcttatttgaatcttctgtctctctctccctctgtctttggttaattaactagcagtgtgttgatcttgttttcactttcaaataaccaattttttgtttccttgattctttgtgttggatttttagatctcaattttattcagatctgctctgattttagttatttattttcttctgctagctttggggttagtattgtcttatttttctagttcttctaaatgtgatgttagatcattaatctgagatttttctaactttttgaggtagacatttagtactacaaactttgctcttaacactgtttttcctgtatctcagatattttgatatgttgtgtctctgttttcatttatttcaaagaatttttggtgtctgccttaattttgttgtttacccaaaagtcattcaggagcaagttgtttaatttccatgtcattgtgtggttttgtgacatcttcttggcatttatttctatttttattctactgtggtctgaaaatatggttggtatgatttcaattatttgtgtttattgagacttgctttatggataagcatgtggtcaatcttggactatgttccatgtgcagatgagaagaatgtatactctgcaattgatggatggagtatttggtagatgtttattaggtccacttagtcaagcattgaacttaagtctggaatttttttgttagttttctgcttcagtgatccatctgatgctgtcaatggggtgttgaagtccccctctattcttgtgtggctgtctaagtctttttctaggtctaaaagtacttgttttatgaacctgggtgctccagtgttgggtatgttatttagaagtgttaagtgttcttgttgaattgaaccctttatcattatgtaatgtccttctttgtcattttttttactgttgttggtgtaaaatgtgttttatttgatatatgagtagtgacctctgctttttttcgttgttgttttccatttgtgtgatagatctttctccaaccctttctatgagctaatgggagtcattgtgtgtgagatgagtctcttggaagacagaaaatggatgaatcttgttttttaattcaacttgccattctgtgccttataagcaggggcattcaggccatttatattcaaggttaatattgatctgtgaggttttgatcttatttcacaataggatctattctggggttgctttatagggtctatgggctatatacttaagtgtgtttctgtagcaggtgtattagtatgttctcatgctgcaatgaagaaacatctgagactgggtaatttacaaaggaaagaggtttaattgactcacaattccacagggctggggaggcctcaggaaacttagaatcagaatggaaggggaagcaacacatccttcttcacatggtggtaagagaaagaaatgccaagcaaagggggaaaggccccttataaaaccgtcagatcttgtgagatctcactcactgtcctaagaacaccagcagggggtaactgcacccgtgattcaattatttcccactgcatccctcccactacatgtggggattatgggaactacaattcaagatgagatctgggtgggaacacagccaaaccatatcatttcaccccagaccctccacaatttcatgtcctcacatttcaaaacacaatcatgcctttccaacagttccccaaagtcttaactcattccagcattaacctaaaactccaagtccaaggtcacatctgacatgaggcaagtcccttccgcctatgagccttaaagttccaaaatgaatctcctttgtcttcgtgtctcacatccaggtcacgctgatgcaagaggtggggccccatggctttgggcaactccactcctgtggctttgcagtgtataaccccactcccagctgctttcatgagctagctttgagtgcctgctgcttttccaggtacacagtgcaagctgttggtggatctaccattctggggtctgggggatgatggccttcttctcaaagctccagtaggcaatgccctagtggggactctgtgtggaggctccaatcccacatttcccttccacactgccctagcagatgttctccatgagggctctgcccctgcagcaaacttctgcctggagatcccagcatttccatacatcctctaaaattgaggcagaggttcccaaacctcaattcttgatttctgtgcacccctgggttcaacatcacttggaagtggccaagggttggaggcagggcacaacatcccaaggcagcacaaagcagggggggtcctggacccagcccaagaaaccattttttctcctaggcctctgggcctctgatggaaggggctgccatgaaggtctctgatgtgccctggagacattttccccattgccttggtgattaacattcagcttctcattacctaagcaaatttctgcagccagattgaattactccctagaaaatgggtttttcttttcaattgcattgtcaggctgcacattttccaaacttctatgctttgcttcctcgtgaatgctttgctgcttagaaatttcttccaccagatactctaaatcatctctctcaagttcaagctccacagatctctagggcagagacaaaatggcaccagtctctttgctaaagcataataagaatcacctttattccagttccaaacaagttcctcttctctatctgagacaaatctaggtctggacttcattgtccacattactatcagcatttggtaaaagccattcaaaaagtctctaggaagttccaaacttttcccacatcttcttgtcttctgagccctccaagtctctaggaagttccaaactttcccacattttcctgtcttcttctgagctctccaaactgttccaacctctgcctgttaccaaagttgtttccacattttttgggtatccttatagcagcaccccactctaccagtaccaatttactgtattagtccattctcatgctgctatgaagaaatatctgaaactgggtaacttataaaggaaagaggtttaattgactcacagttccacagggctggggaggtctcaggaaacttacaatcatggtagaaagggaagcaacacatccttcttcacatggtggcaagagagagaagaagtgccaatcaaagtggggaaagccccttataaaaccataggatcttgtgagaactcacgagaacagcagcatgagggtaattgccccaagattcaattacctccaaccaggtccctcccacaacatgtggcgattataggaactacaattcaagatgagatttgggtggggacacggccaaaccatatcagcaggtattgttttttcttttccatgtttagaactcccttaaggatttcttgtaaagctggtctggtaatgaatccccttagctcttgcttgtctggaaaagatattctttctccttcactgatgaagcttagtttggcaggatatgaaatccttggttagaatttcttgtctttaaaaatgatgaaaataggtccccagtctctcccagcttgtaagttttctgctgagaagtctgctgttagcctgatggaattcccttagtaaatgatctgatctttttctctagctaccagtattatttttttctttagcattgactttggacactctggtgaatataggccttggtggtgttcatttcgtgtagtatttcacagatattctctagatttcttatatctggctatctacgtctctatcaagattaggaaagatttcttgaaatatttacttaagcgtgatttccagattgtataatttttctccttctctcttaggaatgccaataattcataggtttggtcactttccatagttctatatttctcaatgactttgttaatttttttaatttgtttttctttatttttgtctaactgggttaattcaaaagaccagtcttgaagctctgaaattctttcttctaattgacccagtctattaatacagctttcaattgtattttaaaattccttaagtaagtttttcaattccagaagctctgattaattttgattgaagatgtttatctctttcttcatttcttgggttgcttcagaagttcctttgtgctaatttttaaccttgacttgcactttgttgagcttcctggcaatccatgctttgagttctttatttgttatttctgagtttcctttttggttaggaactattgctggagagctagtgtgatcctttggtcgtatcaccactttcagatttttcatggtgccggaattcgtatgttggttccttctcatcaggagaagctggcaattctaatttttgtaattattttcgtgtgggtagatttttttctttttcattctttccctataatattattgcttttttctttcctttttcctctcctcctttcctaaagaatgtgattgtagagaatgctgggtaggtattttggctttgtttctgtagccctatgcactcaggtcagcaggttttatattgggctgtgcagttcaacataaaagccagtagatggcacttataggtaagagctggttgcagtcaacactgctgggtatatacttgatctttgtttactgggagaagctttctgttgccccaggcatagagctgattcaaggagtgcacagtggtatgagctcactgctcagcccctggctggtggggaccaatatggacagggctggacctgtaggttggcctaccggtctgctgatggcaagcacaaacggaggatctagtgggtgaccaccaagcaccaaaagttatgcctgggtggggagttgggaaaactccttggtcccaagttctctgcacagggatggggtgtagactaaactttaaatccaggagagtgggtcctccaaatgcttggagatctgcctgagtatggagtggagagggcccttctgcaccaaaatctatgcacaggacgggtggggcaattcaggctgatgattcagatgagcagcttctctgaatgattggaaatctgccttggcatcaagcagagagggccttactgcatcacgatctaagagaagcagacaggggcacccagtatggcatacacagaccagttccaggttgccaacctaactgcaagtctcatcgcccaggagaaacctatagctgtagcagctttcttcctgcccctgtgatgagggagagcacaatccagtgcttactgctgagatgctttccattgttctggctgaggaggaccttacctaggaccctacctagcttcagagcattcactccagtctctgggctgagaccaaattgtctgcatggccatgttaccaggtcatcaaagggaatgggtgactttgtatgcacccagattaacaagggcattctgctgtctgtttcaggcctgggaaaatgtctgcagcttttcccagtgtctttccctcacggcatttccaagcctctccccaggttcactccagggcattggagaagcagagtgctctccttcagtctgggttgctcggatgcccagtgaaaaggtcggggagtggaatgagggaggctctctgcctctctcacatactggggatgcattcccttttattagccagatgccatcatgagactgtttgcccacattctcctccctggattctggagtgaccttcctgattcctgtggactcccattttccttctggaattgaagctcacagaactgatctttatgcactttcttgccgtttccaagtggctgaggcatgccgaaagcctctaattcaccattttggaaaaaagatcacttttttcctaatgcaggaatttgaagctatatgtttttcaattagcattgctaagtgccattccacaaattttgatatgttgtattctcattatcattttggttaaaaatgtgtttaatttcatttttctaatattataatttcctttttagtctatgaattatttagaagagttttttatctaatgctcaatattgtggattttgaaatactttattattgatttctaatttaattctatcaggatcagataatctgaaatatttcaatttcttgacatttatggagacattttatagtccagtatgtggcatatcttgatgaatattccacgtttgctgaaaatagtgtttttcactgtagttttgctatgtaggatactgtaaataccaatttaggctcctgaattctcattttgctacttgttcttaataaattactgagaaagtggtgtaaaactatgattatagatatgattattttccttttagtcatgtcactttgcttcatgaatttttgttctctgtcattagttgcatatatatatacacacacacgcacacacacacacatatatacacacatatttaggattattctaaatatgtatgttcatatttagtattattcctatatataggtttatatttaggattattctaaatatgtacatatttgtaattatgctaaatatatatactttgcataattataaatatatatttagcataattctaaatgtatatttcatttttctaattatatatgatatatttagaattattgggcttaattatttcaaagcatatcttttacatgccttttcttttcagtttatctgtatctttataactaaaatctgcagtttctagtttgtagacagattctagtttggtgtttcctttttatccacttagtcaatatctgccttttaactatgggcatttagtacatttatacttaatgtagtaactgatgtggttaggtttaagtctgttatcttgctatgtatttttttgtatcttctgttgtaatttcttgtttttgttggttttctcttttcccgttttctgttgaattaattgaataagtgttagtgttaaattacaattcctttattgcctccttggcacgcctctttgttgtcttttagctaggcattgttatcttacagtctacttagaatgaatattgtatgttttcacactttattcctgattcttcacacctcctgctttattcttttttattctcagttcagaccagatactccctactttttgcttttcattgttactttacaaatgtaatatatttacaacagtacaattccatttactcattccctcatcctttatgcaattgttatcttttatttttatgtatattgtaacccttatctcagtgtatttacttctaatttaatcagttggttatttaagaaaatttatgaaaaaatgatattctatatttttctaactatgaatatttaccagtgcgttccattctagatagatccaggttgcaatttaatatcattttccttcagcctgaaagacatagtttagcatctcttagaaagcaagtttgcttacaatacgttctgttttcacttacctaaaaaatcttcattttgcttgcatattttctggatataaaattctaggttgataattattttctttcagtatggtaaatatgttacgccattatctcccagtttcattacttatagtaagaagtcaacgattattcttattgcaggattattgtacataaagtgttctataaactcctttattcccctactactttcaacattttttcttaatttggtttccaacagtctgactaggatgagtctagataccattctttttatacttattgcagttggattttgctgaattttttcaatctgttgatgagtgtttttcatcaaattttgacattgttagctattattcctcaaatatttttattcaatatttttcagttttgttttccatccaaatataactctcttcttcaggatctccaattacatttatatcaaaccattagatactgtttcccttgttgaggctcgtccatttaattttttctctctttttcagattggataatttctattggtctgtcttcagggttagtatttattttgccatctctaatgtgctcctaagtctatccagtagtttaaattttttttgtccttttcagttctagaatttccatttttaatactttttttcctgcttggattccctatattttcattatctgagatcatatttttatttaattctttaacaaatttgtctttattaaaatatattttcttgtttttgtttttatgtgaatcattatttttaaataaaataattgccataatggataatacaagtactctaaaaatatgtaatagagattctgggttctgttaatgatctctagagagtattcattcttgtcctgctaagcaggtaaattactggctgattactttatgcttgtaggctttcgaggaacctctaacttggcaggacctgacgtcagattctgtctgtttgggcttgattgtatgcttagctagggtggctctagaccaagtttcattctaaagcttggttttcactctgaagatatagtttttctggtgtttcagtgggatgccaagatgttgatgaattatgaaaatctctctactctgtaggaccatagctctcacatccctgggcagtactcttcccctagcatagcttgatctctagtatctgttgtatctcagccccaaatcaactgatctctgttgaatgaagtcgctctcttatgtgtagctacagactcacaggagactcctctaaacagactttaggggctgcccctctatagagctccctcagctctgctgccctcacagatcctagacacttcagctgctctgaatttttaattatttcttatcagctacctaccaggttaaaaaactactgggttctgctcagaatccagctccctctttactcggaaaattgtctcaaggaaaagaacaaagcaattatagggtttctaacgagtttcccttttccgaatgattgcagtcttatactgcctgtttttcactgcctgaaagccatttcctcattatatatagtaacaattttatagttataaatggtaggaggactagtccaagactaaattatgtctagaaacagaaagcttcccacaaaattttactattaggtgaaagataatgagaagccaaataatatccccgcagataattaaagcatcccataagcatgcctttgaacatatcaaaaccataacatttcatttaaaaacaagataaaagactttaagtgtgtcatacaatatcataaaagaacaacataaattagaatttgcaatattcagcaatgaggtgccaaaactcagaaaaaaaatgtaaaaaattagaatcaaaatacaaactcatagaaacacagaaaaaatgaacaaaacaaagagtgccctaagagaaatagaaggtgaaaataaggaatttttttaattgaaaaaatacaatatcagaaatagtaaatatttgagcaaatatagactggacttcacctcttaggtttaaaatatgctttacagctaatagcaaaaatcacagcattgtcttgtgaaattttcagtgaatgatatacaaggcaactaaaacataaaataggtaaagtaaagggatctatggggtggtgaaatttctacataaaacattaattcaaatagactgagaactctgttattattatgcatattttaatccctacagcaattggtaaaacagctatatatatattatatatgtatatatagagagatattctaaactatacaattgataacttagaagggaaggtttttaaatgttcacgtatcacagaagaaacgaaagagaaaagggggaaaaacaagtaaaaagaaagcaaacggtgaaagggtacacctgtatccaaatatgtcaatcattatattacgtgtatatgatctagagacaataattaaagacagagattgtcagaattaatttgaaaatgacacagctacgttatgagtgtacaagaagctcactttaatataacattgtaggaacattaaaaattaaaaaattaaaagcatggataaatataggctttgcaaatataaatcagaagaaggctggagtggctgtgttaatattagacaaagtatatcttagagcaaaaatcattagcagggttaaagagggacattgcatgttaataaaagagattaattcaccaagaaaacataacaaagttaaatgtttatgcatgtaacaacagaactttaaaaatacatgaagcaaaaactgaaagaactaaaaaaagaaataaatccacaattactgttggaagcatcaacactcctctctcactaatatgtagaactagtagagagaaaatcagcaagaaaatagaagaaataaacaacactgtcataaaatgagatctaacttacacttatagaactttctaattcataaccacagaatacacattattttcagggcacacagaacattcagccagatagatcatatctgggttattaaacaaacctcaacaaattttaaataattaaaattatacatagtatggtctctaaatttaatggaatgaaatcagaaattaacagcagaaagacaaaggaaaaatctctaaatacttgaaaattgaacagcacatttggacataatctatggatcaaagaagtcatttcaggagaacaatagaaaatgtttttagctgagaaaatatgaaatctaacacatcaaaatttgtaggatgcaggtaaaactgcttccttggaagtaatgcgtatattagaataaaaaaatggcctcaaatcaagaatttaagctttcactttaagaaactagaaaaaagagtaaaatacacaccaagaaggtagaaggaaggaaagagtaaaaataataatggaaaagataaaaatgaatttaagagaaagggacaatggtaaagatagtgttcaataaacagataatgagagttcccaaagaaaaaaatcaaaatgcaaaacaaaaaccataaatcaaaaaaacttttttataaagttaaaaaaattccacggtatgtattgcgagaacacaccacgtgtttaagagttgatccattggaagccattattcttagcaaactatcacaggaacattaaaccaaatacctcatgttctcccttacaagtgggagctaaatgatgagaacacatggatacgtagggggaaaaacagacaccggggcctatcggagggcagagggtggtaggatggagtggatcaggaaaaataactaataagcactagggttaatacctgagtgacaaaataacctgtacaacacacttccatgacacaggtttacctgtataacagacctggacatgtaccctataacttaaaagttaaaaaaaaaaatattgacccagaatgaccacaataaagacatattctaataaaattaccacatcttaaaaaacagtcacttttcttcaaagtgctaaacatagaattaccatatgctttgtaggagtacaaaacaacagtaaggcaaagaatagatgatctgactgttaacagcaataatttatgccagaataaaatggaataatacatgtgaggaactcaaaaaaatgtgagctaaagattttatatctggcaaatatgacttttaagtataaagggcatagatcatcggctgtcaaattgcaagaactcaaggaattttgttcccatgatttcttcttgaggagtaatcaagaaaccagctttatttttttccttatatttatgtatttatttatttatttgagactgagtctcactctgtcgtccagactggagtgcagtggcgagatctcggctaactacaacctctgcctcccgggttcaagcaatcctcctgcctctgcctccagagtagctggcattacaggcacacaccaccacgcccagctaagttttgtatttttagtagagaggggtttcaccatgttggccaggctggtctcaatcttttgacctcaagtgatccacccgcctcagcctcacaaagtgctgggattacaggcatgagccactgtacctggccagaaaaccagctttagacaaccaaaatgattcaggtcacatgggaatagggactggggcataaacatatagttactagtagaactaagagttaaaggggttacattatagaatgtatagtatataatagatttataaattaagaataaaattaattttttaaatttatcaaatatttataaattgtttcaaattttattcaattcttttcaaaaactgggaaagaatactgagattatggacaaaaccaactttttaagctattctcaaaaactataatggatggctataatatattgttaaactgaggcttttgtctatgtaatgtgtaataaggtaaattaatcattatggatattccaattctatgatcccctgtgtccttaagaaccatgattctcagtgttgaagaaagaaggtagccacacaatacaaacaaaaatcttgttcaaaaagcctgtacttataaatttggattgtaaatatttgtatgaatttgtgggatgttttattttacaggtgctatatacatattttctagttttatttactgaagagatctagaaacaatgagcaatcaagtaatagagaacatccctagagtccacacagagatcttgaaatattattttctattaaaagaaatcaaggttttttgtttggttggtttttgtctttcgagaaacagctgatccacatctgtggcaggaattgtacaggattaccctggaatatcttttacaccaaatgtgtgggtactatcccaaactacaagactcatgtagaaaagaaagcagaagctaatttgaagacattttcacaggtcaaaagtgaacaatttgagctttgataacaattgcaatggcttgaaacccatcaaaaatttaaatccttgaactcataacaacatatttttaaaaacctaaacctaataagtcacctgtggagatgagcagggaacatattaattatttaaaactggtaaatcaagaaaaagaacctaacatttattttgtcttttctgtatgaactttcacttaaggcatccagtagtagatgaggggtagtacctatttgtaaatgttttccactaataaatgacaaataaataatagaatattactattttgcaatcccattgaattaatgaatctaagttgtaagcatcaagagttgctcaacatcataaaaaagagactgagatatcatgtccctcctgatgaaagagcccagctccacttacagtcttaccattgggatcaggctgatccagtctcagtctaatggacaacatgcaggaactccagagggtagagggcatggtgaactgccccacaggtgcaaaatcagaaaaatccagactgcaggaaattgcacaggtccaacagcctgggttcttcaacaataaatcataagggaagaagggaatgaaaagaaaatctatgtagtaaaagagatttagaagacatatccttttttttaatgggcaatactaaactcttgtgtcttgagttgaacacgtgggtgataaaactgtaaagtaacacaaggaaggaaataatgatatagaaatgaggataggagttactttgtggggaaaaagaaggggcttaagattaagatggggcataccgaggggcttctggtatgggcggcaaagttaaatttctatacgtggatggtggttaaaagggtattcaccttacaagctttatattcagctgggtttttttggtatttttgttttattttactgtaaaaatgggttggaaatatcattatttttcttgtggaccttgccaattgtggctcactttgaagatctccctgaatacaataattaataagtatttacttatatattcttcagcacagtttaaatgagtaatttcatatttaaactatttaatatatgttttactttttaaatttttattcttacagatttaggggtacacatgtagttagttttgttatggatctattgcatactggtgaagtctggaattttcatgaatccatcacccaaacattgaacattgtacccaatagatagtattacatctctcactcccctcccaccctcctccaatgtctattattccactctatatgtcacttacaagctgaagccacccattgtttagctccaacttgtaggtgagaacatgctatatttgcctttctgtctctgagttatttctcttaggataatgatctccagttccatccatgttgctgcaaaagacacaatttccttcttttttatggccaagtagtattaccacattttaaaaaatctaatcatgcattgtaggacactcacattgactccatatctttgctattgtaaagagtgatgtgatatacatatgagcacagaagtctttctgataaaatgatttattttcctttgcgtaaataccagcagtgggattactagagggtagttctatttttagttgtttgagaaagttccatacaattttccatagaggtctccatacaggttgtgctaatttacattatcaccaacagtgtataagcatcctcaccaacatctgttattttttgactctttaatattaacaaggctgactggtataagatggcatctcactgaggttttagtttgcgtttatatgatgactagtgatgttgaacttctttttttctatatgtttcttggccatctgtatgccttcttttgaaaaaatattgttttgtctgttcgtgtccttcacccactttttaatgagattttttttttcttgtcgagttgtttcagttccttatagattctggatattagcttattgtcagatgcactgtttgcaaatattttctctttctgtaggttgtctggttactctgtcaattacttttctgtgcaaagctttttagtttaattaagtcccatttttctatttttgcttttgttgcatttcctttcgaggacttagttataaattctttgcctaggtgaatgtccagtagagatttttctagattttcttctaggatttttatcttctcaggtcttactttttcaatccatcttgagttaatttttctatatggttagagataggggtccagattcattcttttgcacatggctattcatttgtctcagcaccatttactaaagaggctatctttttcccaggtgtatatttttgttgatgttgtcaaaggtcagtcggttgtaggtatatgactttatttctgggttatccattctgttttattgatctatatgtctatttttatattagtatcatgctgttttggttattatagccttgtaatataatttgaagttaggtaatgtgacactttcagtttattctttttgcttaggattgctttggctatttgggcttttttgttggttccatataaattttaggattgttttttataattatgtgaagactgacattggtaatttgataggaattgtgttgaatctgcagattgctttggatagtataaattatttatctagaatgtatgcttagtatatggtgtgatgtagggattttattttaccattatttcactctccataaatattttcaagttgttttttactactgaaaaaataatgtatgcacgtggaggaaaaccataaatgaagcacaagagaaaagaaacccttccttccatttatagctttatctctcttaccaaagacaaccagtcttcctattttttgttattgttgctgttgttgttttgcactgcagtaaataattgttttccatgcagcatctttaataatttagctttgcataaagcatcccactttaactcagttcatataatttttgtggatttgattttaacccaaagttgatgaggttccttagtcacagaaattgcatcaggaaagggaatatgatacaagtcaggccaacaagagccaacaagactcaattttaggagttttatctcaactactgagcaagaaaaaaaaaaaactttaaatttggtatagtcaagatgtcatctggagctgttagaaatcacaccacgtagagcccaagaataaaaccaacaaacagaatgcagagccaagatatggaggaaatcagagactgatagtatggttttgaaccctgcccagttatatgtgaagtctaattttatacttttcagcttataagagataaggaattccctggttgcaaacttggattgaatttttttcccttgcaatcagaatctagctgatagtatattctcctgagaattaattctatctgcataaacacatacacttatgtgtatacacacaagactgtcatggtcagaacttggaatccaaatagatctaactaagttgtgttttataaaccctctgattttcttctcactctctgaaactcagaaataaaatagatttgagtaatatagaatctcattatatgtgttctctgaactcttactatttgaagtgtgtgtgtgtgtgagagagagagagagagacagagaggcagagagagagaggagagagagagagaaaagaggggggcattttatatactgtcttggagatctttcacatcagttcgtagacattactttaagtggctgtaaatttttttctatgtagcatgtgcttaaccagcatgtatcccactgaaagacatgtttgtgtacaattccttgctattccaaacatatatattttatcacgaatgtatatgaatatatcaaacagtaaggtcttaagagtagaatcgttgatccgaaggatatgaacaacttagctttttataagagaaaaataagagtttggtttggacttgttaagagtactgaaataggagcaggtcttggggaaaacatctttattatattaaagatgtatcccaatgtttatttataaatgtcttattttaccaaaaaaaagcctttaaaatttttatgaagtcctcaactttttaacctatttgaatgattaattatattaaaagttttccagatattgaaccatctttgcattactagaaaaagcctatcttgggcttgatgtgctatacttttgaaatactctgagatatttaattatacttttgaggatttttacaatttttaaaatatgtatctacttttctgttgcatctttttcaggtttctgcagacatcttaagtaggatgataatagcttttgatatcaagtgaaacaatttatatagcatgagaattatttatgatgtaaacatttgcccataaattttttttgagccggggatctcatttgcagatagttctttagaataaattaaataaactgtcattgccactaatttagtatagtttttcactttttgagtcagttttggtcactaatctgcaaaatatctatttcaaacagaatttttattagtatatataaatttttcaaaattttatattgtacttttgttaaatatttcttatattcatatcatttatactttattagatacaacaaatttttgtcactttttcatgatacatcaaaaaataagttctgaattgatcaattctattgctctgtcttctaattcattacttttcttttcacttttcttctttacttcattgacctagttttggtaatgaatatgtttacttttttctttttattttaataaaattacaaggcaatgaaattgcctctgactaaatctttggttgttttatgaaatattttttcaaatagtgttctttgctatttttttctgagtggctcattatttctaatttaatttccttttatccaggataaattcgagacatatttgtttcttttcatgtagtttgaaattacaagcaaatttatgcacatttaaaaatgtgacaagtagtataagtttttgttgttgttgttttgagatggagcctcgctctgtcatccaagtgggagtgcagtggcatgatctcagctcactgcaagctccgccttctgggttcatgccattctcctgcctcagcctcccaagtaactgaggctacaggcacccgccaccacgctcagccaattttttgtatttttaatagagatggggtttcactgtgttagccaagatggtcttgatctcctgacttcatgatctgcccacctcggcctcccaaagtgctaggattacaggcgtgagccaccgcacctggccataagttttgagttacgttatactctgtcagctaatagtctagacaaattttattatttaaaaattaatggattaatatacattcatattttataacttttattaaaaaccaatcaagaataaactgtgaatatggtgcaacattccctgctgtgagatgcttggttaaggaattttgtttctcctgtgtggcatccatttgagaaaatattctgcccatgagattcaagtgggctacaacccatacatgctcctttactttcctttctccctttagggtgacacaggcttaaactgagacaatccagcatggaacacttgcaggaagtactaggaaagtgcattttctttccatgagggttgccaaactggaagcatgttagctaaagctacctgtagtcattttgtggccacattgggtgagattgtctgagaaagcaaaccaactgaagcagagcagagaagatactctaccaacctagttggagccctggttccagccttgcctgaagctaaatgcacctctatgcttcctttttactgacccaataaatttccctatttgtttaaacaagcttgatatgattttttttcacccagagactcttgattcatttttttattaattatgtggcctcccacaaagatgaatactgatgaagtatactgccagccaagaagctcagggctctgatttgtagtctgaagacacatgtggcatacatcaaagagtaaagatctccactggaagctttgctctgttagcttgttgagcttttgttgcttaaagggagaagaagcttgctgagttttctagaatagcacagtgtattgtttgagtacatatctttgacatggcacatattgcaacatgatcccaattcacagcaaaatcaatggtgccaaggttatcattgtctcaatatcattggacctcagaaatttcacaggggccccagagctttcagagtaaaaacatcaatcatccatgcagtgatgcaggattaattcacatgttcaaaagcatctggtcataacaaagttgtgtcttcagaggaagacttgttgtttgaagctcatcctccagcaagatcaataaatgtcccaaagcgctgaggactcattcttctcttttatgttttcctttgcataatgacaaaaacaaatctagggacatttggagcagttgtctctacttagaaatagtcccttggggctccatgggtaaatgccttaaataataagctttaaatgtaatggatagttcttgttcagaagaagaaataatgttctttttaagaatcagctgcaaaaagggggaatcaaagaaagaaaacttcattgaacttgaaagaaaacattgggagaaaaaaatcaccaactatggaaccactataacttctaacaatgcggcatgaatatgtctaagttttcacaaaataacacatttaagaattttaactagtcaaaatacaaaatcagtcaacttattgtttgaaatgccttgttatttaacttaactgaccatataattcaaccagacacgtacttactatgtgtacatgtgcctgcacacctgcatgtgtttgcagatcaataatctgaagatagtttgcaaaaccttgaaaagtttacagaatccctttgaagcactgagtaaatctttctttagttttggagtcatttggaggcatggttcactttactcacatcagacttttgctttagcaacaacaaaaaatggacaattttctaccaaaagaaaaaaataaataatttttttgaaaaatgtggctttatttgctcatggtagttcgcaccaggagcagaaatatgaactccttgaaagtaagtctatctgtaaagtattaagtaaccacttcttaaccttcaactctatgctgtaaactttactttttgtaataaggttaaaagagtgacactaatggaagtctctgaaaataacctacagcctctgcaaagactgggtgtgtttgcataatctaaactgagcaaaccttggaagaaatatatgagcacacattctaacaccttcaattaagttctgttaaacttccagagactatgtatcttctataaatggcgaggaaagtagttgattcagacaggctacagtgttggaaatggactagtggctgtatttaatcttttgagggttttattgtttcaagctagttagattttgagctcgagcctctaaactcttcaagaagtatatagaaagaagtatctgaactcttacataagatatattctatatgcaaaataccagacagctatcaacaactttctccaaaatcagagaaaactggaaataaaggagagagtgtttttgtttgtttggtttgggtttattttttgcaaggcgctgtgttggtggtggtgtttggatctctgagttttctgaaaccccaaacctctgcctgacccatgactggcagtgtgtctcagagacttgctcattacgcaccatgaatagcaacgtcccctggttattgcaatcagtgtccatcagttggagaaccatgcagatgtaatggctgatgaatcacattttatgatgcaaatggccctgggaggaattgtgttccctgtatcccagatcctttctccttttaaaaatctcattttcagtgtcttgcatgtaacattttaaaagttatttttattgtttttgtttccatagagaaaagccttattgtagaagttacaaagcttgcatgaccaaatcacaaaagaaatttagttctaaaaagtaacaaaagaaaatgagggaatcttttaatttttttttttttaagtttaccattggctttggggagaaaaatcacaaaagattaggctacatggtctgcaagccttcaaagagaaaaaacagttcttttaatacaggtctagtaactaattaatattttgaaattttacaatgtgtataatctccagctattacaagaaatagtttattgtgagcctctcagatgtgaagggaaattgatgacctgacaatatagtggagaatgttagagcaaaatgacttttctttccacttaaaataacatgaagactatttcttttctattttgtcaaattatcttgatgctatagattcttgaaaagaatcaggatcctgattctgatcaggatcatctctgcacctcctctcagaatttgcatatctcaaggcacaatttagggtaagcatccttgggcaccaagcattttacattgtcccaaaagtctcagcaagtcctcggcaaagtcctcttgtctctgtctgtctagctgcctcttcctacaccccaactcccctccccttgattctctgttccatttcatctctcctcctctttttctcatgttcccagtagattggaacgtttggaggtttcttttcctacaccctcattctcctgtctttgttgtcttacaaacatatatgtgaacccctcattgttattaaacttttttcctccctaacctcactttctcatgagataaaccatcctgtcatcagttttaagtaccttctgtctgtcataaaataggccactctaaaattttttttaaatgcccatttgtcttctgactacatgaccaacaaaggttcaacatctatccctacattcttccagaatttcttacactatatttatttccatccattctttctctttacatataaataacagagattggtctgtttgtagtatctgaggttttctatgtaagatacagatgtcctgtccatttcaggactctcctgtctcttgcctgatgtttgactgaaacacctagcacctcccaggactaggtgcacatcctcttaggatatagtcttcttaataggggactgagctctgataatgtccaccactgttgtaactagaaatccttttctctgatttcactgtcaatgctatgagctcattcaattccaagtgtcccataatttggattgtttatagtctagtcaggaatgagccttgccacacccactccacttatcagcaactggaggagcaaatgcatatctcagaactgtgaagtcatttgatgccagactttctttggtgtcgccaagttgaggttttatgtgcattttttatctaaactatggagtctgactgcagctgccctcattagctttattctggaaggcagggcctgtcttctgcattgaatcttagtcagtgtgcatctaagtcatctatttgtttttagttttttctttcaaaggattcaactgtttacatttgctttgagctgcttccattatttcataaagtagaccttacctttttagtcctacaaattctaattattagatcatcataatcatgggattggatgtctaaaattttttctccataaatacctcctcaattcagtgtgcatatcctaaacggagatagctgatgttacacagctttttgtaggcttttagtccctagcacagctcttcggacacaggcagtgatactgctttaattttaaatgggggcattcttttttattcattacgggtttctactagcttcaggccaaagcccaagggcctattttgtctaagcaaaaatagccactgtcatttcctgaatgctgagtcaaaactactctgtacgcaagagatggagggcatcacttgtaaggggaggggaacttgaatgcttttcttccactctatttttttccactatcctgctatgctttgctttcccacaagatacactttcatgaagcccctcctgaaatgcacttgtgaactagaaacagaagaaaatccttggtacttgccttctaccatttacaaaatcagccatcatcaagatctgcatagtctgggtattactgtgggtaacagagaaaagctatgttatttcaaacaaaaatttatattgggtcatcctataggtggacaaaatgacactaaatgatgataaatactgtggattctatccagggcaaagtgaatgtaaggaggctgaggagaaggacaagacaaagagaagcaccaggaaggtgggaaaagaagatcccaaacaagacaggcttataaaatttgagccaggaaggaagaggacagaggagacacaagttcaagactagaacccatctgatgtgtgtgatagagatcagtggggccaagaatcttgcaagcctcaagtgatccaaggtgagaagacttaaaagaagtctcagatggcctcagagaatccatttttaaattaaattcagtgtatctcagtccaatcataaagtttctcatccctccctcctgaggactataagctgacaaaaagactagactgtatagggttgaaggaatgaagcaaattctgattgaggaacaatcataggtattgagctgagcaaagaaagacaatttctccaagtcaagtctctaatttttccacctggatgtgaattataacctgagttgaggcgccataagaataatacaatactctatgcattctaactggtgaatgaagtgcaaaatggatgaatgaacaggttttcaagagtatgaaaatccaggccatcatttcactgtctaaaaaattattctttttatgtcttcagtttcacaataaaaactgtggagactttgtggccaacatggattaggtgatgaggttagctgtttttcacctgaagatcagtcatgaggcacagacacaccttgatatgtgttaaggatgagaatgaaaaggttatacaagtaaacaagctgaagaaagaaggctcaggtgggtctccactgggcatcaggtgagcctttaacacaaagacaagttcaggggaagatggccttagacgaaagatccctgaagtcactgtcacaagaactaggttacattctggttacacatccatggattctgtccatggttttattttgtgaacacaatgctttttatctgtggcacattttttgagaagacaaactttgattgctattaaacacagagctaaaaccaagtaagaggcgattctccaaaagcacttcctcagcaaacagcatatctattgtgtgtgggttctttaattggctgagaactgaatttcacctttggcattaaagagaagtgtttatttttactgtcttcactgttttaatgtttaaacaaaatctaaatactgaggtgaactctatcataaaacaagtgaaacggcaacataggttgatccagaaagaagcaaattccagcatggcgggcactacatgtttcagctcatcagttatctgaatcttatggctctaaagatggatggatgagaatacataggcagaagcttcctggtgaggctggtatgattctgttgtcctatcttcaacactatccttctaccttcagggttgctgttgtaggttttatttctttggcttctgttgccagtaatggaaaaggaccacatggaagactgtatttatgtacatcatgtccaaacagaatatcctataatagtgaatcttggaagaaagcttgagagatgtggcccagcgcggtggctcacacctgtaatcccagcactttgggagactgaggtgggctgatcacgaggtcaggagttcgagaccagtgtgaccaacatggtgaaaccccatctctactaaaaagacaaaaattagccgggcctggtggtgttgcacccgtaatcccagctacccaggaggctgaggcaggagaattgcttgaacccaggaggcagaggttgcagtgagccaagatcgtaccactgcactccagccctccagcctggacaacagagcaagactctgtctcaaaagaaaaaaaaaataccagtttgagagatgtatgtgaggactgattaccgaaagcgaaagggtttagtacatctcatgagaacagagcagtcacaagtgatataaaccaaactcccttggaaatttgtaatctatcaacttctttatttaaagagaataggaggtttactgtgaaacagtcataagacagatttccagaaaacataacaattcagaacatatatttaatccctcctcaatccagatccttgttgaaacaatgaaagagtacaatatactgccatgaaaagtactgagaaaagtctacagatagtgacatggaagaaaagaaaaaatattaaatagatcaaactagttatataatttgtatctcatttctgtaaaataaatttaacatttataagtgtattagtttgttctcacattgctataataaaatacctgagactgggtaattaaaaaaaaaaacagatttaattggcacacagttctataggctgtacagagaaaacagtggcttctgcttctggggaggtttcaggaaacttccaatcatgatggaagccgaaggggaagcagacacatcttacgtggccagagcaggagcacaagtgtgaagggaagtgtctgttcatattcttcactcactttttaatggggttgtttgtttttttcttagaaatttaagttccttgtagattctggatattaggcctttgtcagatggatagattgcaaaaatgttctcccattctgcaggttgcctgttcactttgatgatagtttcttttgctgagcagaagctctttagtttaattttgcagggacatggatgaagctggaaaccattatcttcagtagactaactgttaacaggaacagaaaaccaaaaacaaacaaaagcatgaagagggaagtgtcacccacatgagaactcactattgtgatgacaacaccaaggggaatggtgttaaaccatgagaaccggcccccatgatccaatcacttcccaccaggccccacctccaatactggatattacaattcaacaagagatttgggcaggaatacagatccaaaccatatcagtaaatataataaatatatattaataaatatgtaaatatatgtatgcaagttaacaaatgaaccagttggtatgtaagtatgtatataaaggaccatagcagttacattggaaattaagactttcattaaattttgcatgtgtatattttcagtttcacaagtataaagattttataaaatttaagcaatgtaaggtcacacaataaacatttaagtctttatttatctctgaccctttcaactcgacatccattttctaggttacacattttggaaatgtttggattgtttgcaacaaccattttactctttttttctgattttttctaatcagaaaaataaatattaaaaataatatataagccaagaaatataagttttctatcagaattagaaactatggaagagttctatccatatgtagaaattcaaaagtatttctgctctctatattatgaataagaccaagccaaggaaagatttggccaactggcgattcaccacatatgaagaaaaaactctcctgggaagtaaggggggaaaaaaaaaacactggacaagttctccttaacatttcccaagagcagtggctggtagtgagggctctgggggaggcagacagtgagtgatgaccagtgacctaggaaatggacctgacattgggattcatacatcctgctgggtggattttctcctgccatttagttctgccagctctcctggacaaaacggccagttagagacaaagtagccacccaggtgaaagtggggtagaaacgatttttaatgtgtgtgttgatcgtgagcgtttcttctgtgaattttctggagataattgaatctccctattgcagttagcttggacattggcatctttcatatttgggctacatattcacccctggaaagctgctgaagctctgacctagttgaagaaaacagaaatcaaactagaggcttcacttccctcttcattcagacctgaaaaactcatatggggcctatatgatccatgagagaacccatctcagcttccaacattggacaagcatagacttctctccccaaatctgaacatttgggacataggaagcaactgaaatggggacagatctaaaacatctgatcaaattcccccttgatagaacctctcatttatcaaaaggttgtaacacttctgaaagtaaaacaagtcatctggatgtagggatgacctcatgaggtgctcattcaatattccatgtgctccccaggttggagctcaggactagctctggccagccagctgaagtcatgtgctgcaggactgaagaagcagcagaaagtctctggattctcattttatcctctacagccaccatagaagtcacacgttaagatagtagaaatacaaaatagaagcaatcttagatctctcgatctttgctatgaagggaatcaccctgaaagatctgaatacaccagacttcacttgtgcaagaagtaaaacttaagccactaaatgttgaagtttgtataactgcagcatggcttagctataacagtaaaactgatctgagattatttatatattttatagcatatatttatcaaaatagagaaaataccagaagaagtaatagagaatgaattaaagaaaattcttttaagttcagaggattcactaattcccaggtagaagcaacagaccctaattcagccacattctcattcaaatatttttctaattccaaagataaaacaaataatgattgtgtgtgtgtattgaggagatacaacagcaataaaattcaaataaaatcagattgcctaaaagaggaaaaaattggcttgatgtgaaagctctcttttataatgctgaatggaataatgtcccatattttgagaagaagaaaatatgacagaactttataatcagtcaaactataatttgtaggagaacaacagaaatacagtcttggacatataacacgttaaagaaaaagctttaaacaaaataaatttgttaacagactttctttgagcaaagaaagattgatgaatgggcatcactcagaactggaagaggttccaagagctctgctgcaatagcataagcagtgagcttttacaggttgatgtggaagtaagagaaagaaagcctatttgattggttaaagtgaaaagaccctagttaagaggctagttgctgttttctgattggtaaagtcccgtgtttcattttactatttacattgagcttcagtttgcttacttaaagcactggagctacccagcctaatgacctcctaaattaaaaataataataataatgaatagaacatacaacacatagttcttaccattcctgaaaatttcattccatatgtaagaatgctaaagttcaaatacgatacccattcatttaatgtataataaccattgtatgtatggaaattaatcctctccattactataaccccagagccttcctcaatacttggctcatattaaattcttaatagatatttgcttaatcaaatgttaaaattattgagaaatatactgaactaagaaattaacagataaaacaggatacaaaagaagtgatggtgagcaataaaataggtgaaataattaaatctttgaaaggaggtgtaacataattataaaactgaatgtatctgggatttgtgtagtatggattttatttgaaaattttcttgatcagaatattccagaattatttattgaaactaggaagtgataggataatgagtgagaggtaatcagtaaggtattttacatctcatcttttataaggtgaagtaagtagttaccgtctctgtctttatattggtatgtaggaggaaattgattttgttatgaataacaataaaataaaatcataaggtaaaattttaagaccactaaagaaacatgatcaagtaaatttggtccttataacaaaaccaggggaagctacttcaagaaaacatgaataaataaatgaataagtaagtaaataaaaccaaattcaaaacaagatgaatgaggacctaaaaatttgttgtagcaaatgagaatgaattaaatactttttaaaatacagctttattgatgtataatctacataacataaaaatacaattcaaagattttttaaaaatttacagagttatgtaattttaggacatttgcatcattcacacaagacttgtcatgcccattccagttactcactacccattcccatcccagccccaggcaacaaagagtctactttctctctatatgtatttgccttttctgaacattttagttaaattctttaataagataatctgatttttctaaaaaagaaacatggctctagttgaaaataaaggtgccatgataccaggaaaatgtaaactgaaaagaaatcagatgtagacaaacagcgcaaaacatggaattcaaggccattgaatggtttaggagtgaaatatgatgcagttcccacttgaagcaaatactcttgaagatttagacatttttttcttcatggataaaaagatacagggaaataatatggatttcatgtttcgtttctctgtcatgtcatgttcaattcatatgtgatacttggaactgtgaacagctatattaagaatacgagggggattttagtaaagaaggcaaaatgaagaaaacagagaatctgaatctgtggttaattgttacattattgaattaatcttggagccaaggtacttatttaaaggtatattttcaatattatttcatccatttgagtcaagattttctgataggtacaatcaaaataatcccaactaaagtatgaacttaagcaaaatactctttcctattatttgcttggattctgtatatttcttttttctgtgtttgcatggctgaccaacttttcttatggtcatgttctgtctataaatatgttatgcaatatttccctgctggagcaccactgaacatgcggtgccagctctccgtcccattaccagcactatagacgccaccccaggagcatcttctgaccattgaccttcacaatagtaaccaccacctgatgtcttgcaccgtagaatagttttgtctgcttttgaaatgtgtataagttagataataagtgtgtatgcttttctgttcatcttatttctgtcaacattagctttgtgagattcatccacactattgtatgcagttgaagttaatttgtttttgggcaggagctcatgaagagatcaaacattatttgaagagcactgacttgtcattttcgcaagagcgtcctttgttctggcagcatgtctgagagcaagcagtcctttttgcatttgtgtaatttatacctccttaacaaaatatatattttttgattatagtgggctttgaaggtatgcaagagaaagagattaactacagcttctcttagaaggaagtcctaaattgagtttcacatttttgctcctcttccacaacccctctcttctactatacctctctttttatatgccctcccccaccatacacacacattgtggaaaggaagttcaataggtttgccatttcctctgggagcccacaaaataagaaagatgaaagcagattagggggtacatcagggaagatggcaaagtagggtgctcaaagaatggtccctccactgaaatggccatagttggcaaaaaaaaaaatgacagaatcaacttcttttagaattctggattctaataaaagaatcgcaacaaccaggagagtccttggcaaaatacaaaaaaataaaaaagtaagtgaattttaacgaagagtactgtggcattgttgcttgcctgcctaccattcttagttccctagtactgtggcagcagtcatgatgattacaactcacattcctggtatgtcttgctggtgtgaagaagataatattgacctactctttaaatttcagtggttatgcacttttacctgtttggcagtcctgttttgacacacttcctcaggctggatctggcttttgggaggcatcagcaatggtctctgcagaaagatttaaaacatacactaccaatgcccacctggatcaatggatgacaaagcaagcagcaggcaaatgcaagagcacaggaaagagaaggctagtgagggaggttcttgagcgaacacaggtttagaaaagcctttgaatgtactgaggaagatagagcacatcatgtaaggccaggactggattcatactcagataaaatctgagaagatcttgacttgcacttctgacaaattatgagcttcctgcaagcaggaggtgaagggtaaggtagagttgtaggaagcctgacttaacagtgaaggagtgcctcagctaagagtcaaaatataaagattgagagaggaataactttttttttctttttggctctagataatcaaatttctataaagtcatttgttgattgctgggataatttaacagcgacctcagtgaacacatgtgacaagaattacagtcttcagaaaaaatggtttgaaaaacatgaccaaacagatggccatagcccttaacaatcaacatcagaaaaccatagggaaaatgggtaatttgaatcacagggtcactaaattataatattaaacatttccatttttcaacaaaaacaaattacaaggcacacaaagaagcaagaaaatacggtccattcagatgaaaaaccaaattgataggtgctttccctgaggaagcccagacattgaacttattagacaaagactcattgatcaaattgtcttaaatatattcaaagtactacaggaaagcatggacaaacaaataaaaccaggaaaatgatgtattaaaaaatacagagtatccatagataaagaagaaagataaataaaggtaaataaggattatgaagagatagagtataagaatgaatctgtaactgaaagtcacagtaactaaaatgaaaaattcactagaagggttttatagcagatttgagaaaacaggagaaagaatgcaaaaactaggaaaaaaagacaactggatttattcgtgttcaaaagcagaaagaaaaactaatttaaaaaatgaacagaatgtaaggggccaatggaacacttatcaagcatactaagatatgcactatgaaagtcccagagagagaagaaagatacaaaggtgaagaaaaaaaatggcagaaataatggcaggaaaccttctcaaatttggtgaaatacataaagcaacacattcaaaaagctcaatgaactctaagtaaaatcaactcaaatctataccagaacacattataattaaactgtcaaagccaaacacaaaaagacaatcttaaaatcaaaagagaagtgaattgtcacatataaaggatcctcaatacaatcaatagacaattttacagtagaagccatggaggcaagatggcagtggataaaatattgaaagtactgaaagaaaaaaattaaccaaggattctatactggcaaaactgtccttttaaaaatgatggagaaattaagacattcctagataaacagaagctgaagaagttagtcactagcagacctgccttattaaaaaatgctgaaggaagttcttcaggttgaactgaaaagactctagtaacttgaactcatctaaagaaataaggaactctggtaaagataactacgtaggtaaatgtaaaaattaatactattattagcttgtaacgcctctctttgtttcctatgtgttttaaaagaaaaatgcattcaacagaatattaagaggattctatgccgtgaccaagaagagtgtacatcaggaaaacaagagtagttcaaaaaggaaattagtcaatacaccacattaatagaacaaaaattaattagtctcaactgatgtagcaagagcatttaattaaaaccaatgccctctataattaaaaaagcaatcagaaaactacagatagaagggaccttgtttaatatgataaagagtatttatcaaaacttgctggctaacatcatatccaatgatgaaagactgaaatttccacctaagatcaagaacaagaaaaagattcccactttcaccactgtcattcaacatgcactagaagttctagccagaacaattaagcaataaaaataataatgagttattcaaattagaaagtgagaagtgaaactatctctattctcaaatgacatgatttatataaagaaaatacaaattcacacacacacacgaactacaagaactaacaagcaaattcagcaaaaagcttcaggctacaggatcaacacacaaaatcaattgtgtttctatacaccagcaatgaataatggaaaagtagaattctttaaaatctaattacaacgtcacccaaaagaataaaattcccttgaataaattaaccaaaggtgtaaaagacttgtatgataaatactacaaacttttgccaatagaaagtaaagaagatctaactaatggaaaaatgtcatgtgttcatggattagaaaagtaaatactctcaaaatgagacttattacccaaagtaatctagatttaccagaatcatcatcttttttttttttttttgaaatgtagtcttgctctgtcacccaggctggagtgcaatggcacaatcttggctcactgcaacctctgcctcctgggttcaagtgattctcctgcctcggcctcccaagtagctggaattacaggcacacaccaccacatccagctaatttttgcatttttagtagagatggggtttcacagtgttggccaggctggtctcgaactcctgacctcaggtgatccaccagccttggcctcccaaggtgctgggattacaggtgtgagccactacccccagcctttttttgagacatggtcttgctctgttgcccaagctggggggtagtggtgcaatctgggctcaggtggtccacctgccttggcctcataaagtgctgggattacagacatgagccactgcacacggccgatttaccagaatctttatcaaaattccagtggtctttttttcagaaatggaaaacctaatcctcaaatttataggcaattgaaaagcatctcaaatagtcaaaacaatcttgacaaagaaaaacaaatttggaggactcatacttctcaatttcaaaacttactacaaagctatagcaatcaaacaatgaaatagtatacagcctttgcaaagaaggaaattctgtcactcacgaaaactggatgaaactggaagacatcatgctaagtgaaataagccaggcatagaaagacaaactgtgtaatccccttatatgtagaatccaaaaaagtcagtctcatagaaacataataaaaaggtggttaccagaggctggggatagagtggcagagcgggggtgactaaggaaaaaagagatgctgaacaaagggtacaaagttttagttagactgaggagtaagttttagtgatctattgctctgcacggtgaccacagttaataatgacgtattatctatttcaaattgctgaaagaatagatttttaatgtcctcaccacaaaaaaaattataagttgaggaggtgatagatatgttaattagcttgattgaatctcttcacaatgtatgcatagatcaaaacatcacattgtaccccataaatgtgcacaactattatttgtaaattgaaaataaattacaaaaaacagtgtgctgcttgtgtaagaatagacatataaaccaatggaatataattcagattccagaaatagactcatatgactatggccaattgatgttttacaagaatgctaagaccattgactgagaaaagaacagtcccttcagcaaatggtgctgggacaattggacatccacatgcaaaagaataaagttagactccactcttggattgtttcataacatacaaaaattcactcaaaatggaacaatgacctaaatacaaagactaaaaccatcaaacccttagggcaacataaggataaatcttcatagcattgggtttagccatggattcttatatatgacaccaaaagtacaagcaatgaaagaaaaaaatagataaatttgactttatcaaattaaaaaatatttgcttgataagggtctagtatccagaattcataaggaatttttatagctcaacaatgtaaaaacaaacagcttaatttaaaaatgggccaatgacttaaataagcattctccaaagaaggtgtacaaatggccagaaatcacatgaaaagatgctcaatactactagtaggtaaaaagatgaatatcagaactatactgagatgccactaggatgtacaatacatttaggtgccatacccatgaggatggctataacaaaacaaaaaaaaataggaaaataacaaatgttggcaaagatgcagaaaaataggaaccctcatacattgcagtgggaaggtaaaatggttcggcaactgtgggaaataatttggcagttcctcaaaaagttaaacatagaattactatatgacccagcaattccattccttgataaattaccaaaagaactaaagacaggggccgggtgtggtggctcacacctgtaatcccagcactttgggaggccgaggcgggcagatctcttgaagccaggagtttgagatcagcctgggcaatatggcaaaagcccatctctactaaaaatacaaaaaaataataatttagctgggcatggtggtgcacacctgtgatcccagctactcaggaggctgactcatgagagtcttttgaacctgggaggtagaggttgcagtgagccgagatcacacaactgctctccagcctgggtgacaaaccaagactccatctcaaaataaataaataaacccaaataaatacttatacaggaatgttcatagtgtcactgttcacagtagtggaaaacaatagccaaaagttgaagacaatctaaatgcccatcaagaaaagaatgaatatatacactatggtatatacaatggaatattatttggccatataaataaatgaaatgcagatacattctacaacatggatgaaactcaaaaacactgtcttgtgtgacagaagccagatacagaaggtcacaggttttataactttatttataggaaatatccagaatagataaacacattctagaaatcagattggtgattgccaagatcttaagagtgaggaagcagtggagataaactccttcatgggtatgagactttatctgggggtgatgaaaatattttaggattagatagaggtgatggttgcacaatattgtaaaagtactaattgtcactgactcgttctctttaaaatggttaaatttatgttacatgaatttcccctagattaaacaacaacaacaaaataatctccgttcatcaggatgtcaaatatcacaagggttctcaccattgttccccatcttcagaggcgatttctagggtcaaagggctgtgggagccgatgcatgatgggaaattaaagtgagtctcccccggctcaagtgtgaatgctaatgaaataaagtgtgtattggcctatttttttcccctcatggagacatgtggaaaaacacaaatgtaccctcagagttctttatctgctttacttgtactcaagggagcgttctcattacattgggtttgaagagataaaactaataacaaagaaaaatgagaagaggctggctaggaaagactcttctttgaagtaagccagtccatcctaagttcataggcagtttccattcctggtgggtgagtggcaaagaagaatttgataattaaacgatgaggaaaaacgtaaaatattttttcacagccaatgatgtcattcttccttgaaatactgcctccacagatcaaagataaacaaacagcccaggggtgggaaggaggcatgggcagaaaccgggaataaaatgcacccttaaagccaaaagtatcttttctctcctccttctaaaagccagagccttccatttggaatataaatgttttttaaaactcttgataattacaaatgtaaaggagagaaaagagctttcttcgcagtggggtttcttatctacactgacctctagttcctacagatggggatgtgggccccaattctcaggattttagaaaagaatgtgttaaaacgggggtgggtgtgggtgagaggaagctgaaatgtgtgcggatggtttaacatgcaaatgtcctcactttcttttaggtggaggatcaaggtttggctattttcaacttcttttccactccccctctcttcccatcccagtttagttgcaagagaactgtgaatgtgacaagggctttgtgtagggaattcaggcgaatgaaaggaccaaggagacccagttgagggaacaaacttttgagggtcagtggggtcagcttagaataaatgtgtagcattgttggtattaaggacatactctcagcagggtgtcctgagccgggcacacaacgtgcaggcctgtttattcaacactgaaatacctacggatgggtcttggggagaaaagggaaacttcagcagcaaaagcctgcacctttcagtatcagagcattccccagaagcacaaagtcctgctttttttcccttctaatcacagagaagaaagtgcctgtgcataacccaaaattaattgattaattaaccaatgcattaaaagaagagcttcccttagcaatttttttctttctttctttctctctcttactttttttccctcttccacacatggacaatccaggtcattgaaagcctaagatagaaacagtttcttaacagtgtttgaaaacagcctttgtttccatggaagtggcacaggccctctgtggtttctttccagaaaacatttacctacctcagaggggttttttgtgaggattaaatgagagaaagtgcttaacacactctgagtacatcgttagagctaaataaatattagtagttgttcgtatgtattgctcttacgcggctcagtcatgaagaggtcagggaggaagatgggaggatgcaagttgagctgtcccagctgaggtggaatcagaatcagattagagaggatgcggagggggagaggctgggctcactggtgaggatgcaattcttaggcaattcaaaggtggagaggggagttgtccaaaaccagagttaaagagtgactcagaagattaaggaagaaattcacctgaggactctctctcaggaattttttaaaaggcatatgaatttgcctagatctggcttggggcaacaagattaaaatacatgaaatattaaagaagtgaatgctaaattattttttgcagacctcctgaattttaggataccagaggagaagatggacaagattaacacatgaaaatgatttcaaagctattaagagtgaaagaaagacacgatgttgacaggagtttaatgaaaggagaaattaacattggcagacatggacagaagtagcacctgagaggaggtggtttgtgatggaggcagtctcacgggcaggaagagatgggctaacaccatgggagacattaagtattgactttgaattacagaaagcaagatttcaggaagttgaatttgggggtagagcacaggatgctttagcatttcaagagtgtgctagcagggagatcagctaaaaatctatggccatggtctgtatgtaaggcagtgtggtggtagtggtcaggtgtgtgcatttgcatgagtgtttatggactgaagagattacagtagtgttggagaaagaggttagagaaagaatgttcgagaaaatattcaacagaggtgacgggaaaaagaaacaagataactccaagttttctgtcataggaaactatagaatagggacatcattggaataatgtgaaatttggagaaagtccctgtattaaagatgaagttcattttaatttaactcatggaattagaggtgataaatattggataggtagtattgggaagaggaggaatccattatactgcaggagggaaaaaatacccaggtttgggaagtgggaatgaaatgtattattggtaaattgaaggaagatggtacaggttattaataagacctcttggaaaaaccagaggaggaagctgcaaaatgtttctattcttaaaactttggtgtgaatgcagtgactcaagaatggagacaaaatgcaaatatttgtcaccaagagcccaccttgcatgcattgtcttgggtaccttcaacacagccccttctaatgatgggaagagtcccacgcaaatgacataaagagtcatgaaagaaattacagtccagctaatccagctaattccaccttggggagacattatgtggggattagagattgtaccacatactaaaaatgagactatgaggagaatttgaactttgtgtacagaaggaaaaattggtcctgtttatttagatatatgataggttttactggcctattatattcctattgaccttggctatggccactccaaataaataaactcatgtacatttttatatctatattgcctcatcagatgccatcattacagtgaaaaaagccctagaaaggaagatgagcaagtcgacccaaaggcattaggttattagaagtgctactagagggcgtgagtcaatagttaggtttaatgcctcctgagggcagataactgagtctgaggcattttagtgctcagaacagtgcctggcaaaaagaatgtgctcattaaataagtgagcggaagtttaaaatctgggcactggctccaaaatgagcaatacaagagagaagcatgctgccaggccatcatttctactataactggtgcagtcacacaagcaatagtctacagtatccatgtggctaaataagaacctagtgtcaaatggtttccagtccatagaaagatgatggacagtggactacgttcatcaccttggctgttggggctaaggtagggtaaagaagtatggaggtataagatagaaggatagctaggatctgatgttgagtgtgtccgttgtagacactctttccagtgtgctgggtcaaaaaaatgaattacttgtgccaatgaataaataaaccctgtgttacctacattgcttatcattaactctccccctgtgattcccttgccttggcatccattagttcagctatttagcaaatattaatggcactcctatgtagcaggaatgtggtgttagtgatgcaataccaataaaatgcagaattgtgcctgttgagagatacaacaagtagatactgtggcaagtgctctaatctaaagaatcacaggatgtcatgggcacccatagaacaggcagttatgccaggcgtcagcgttcctgtccctcctctcaccattttaatctctgtatctgttgctgtacagaaggcagtgacagctgttttattgtcagtgtggtaagaaaactcgagagacacagatctcacaagtgtccccatcagaggaaaggtgaaagcaaagaactgtagagctaaaaagtcctctcttcgaatgtcctccctaaaaccttgccagcaaacgaagcttttgctgcaaacccaggaagaaaagcagcatcacaattttcagggcaaccttctgctaacaatacagctgctggggctcagccaagtcccagagtggctgcccagccaagtccatgattaatgatgtcatagcaagcaagatgaggcctcaattgaatgagccttggcttttaacaaaagccttgactaagcagtaaactgaccagagggataaccaactgtggaatgccccaaatgtcactgacatggagtgtaaacaggaatcaaaaaagaataccaatccagggttgtaggcagatgcagaatttgatgggagagaaatggcaccattatttggggatgtctaaatttgtgtctttcattgtatatggagagtacatagctagggtagtctcatttttcagatgcagaaaactaaggcccaggtgttaagagaaatattcttgaacacagtaagttggtgataaaaccaagattggatcccgggctctctctactatcccacacagttttcataaagctcagcaagatcttatatccaagcaacactatttgcttcctaagtctggaaactcctcagaggcatgagtaactagcttttccattcatcattggttgctaaatttcatcaagtaaaatttgttttgttttgttttttttcaaggaggagtcatgggtacaatactttctaagttgttttgtgtttgagaatgactgcatgctacctacactcctgaacaacttagctgggtataatagtgttgggtcgtgcttccttctcttagacttgtagacactactccattttcttacagtgttgaaatggtctttgtggagaaacctgagacctacatgataattttctgctttaaagaaggcataagtttttttctagtttttctttagccttgactttcattagcataacctgaatatatctactgttggtagcatttgtcactactttcctgaaagtgatttattcaatctggagattcagttcttcattttaattaaatttccattttttaattttgacctgtattttctattctattactggggctcttaaagaatagcaatgacctcttccagctctggggccctatgaagaatagaatcaatgggggcctggtcattagtctttgtaaagcgtggccagtagggctgggtaagtattccacctgccttcctttctgtcagaggccaccccatagtggaaccttttattataaatacacatcttgtgagtgatatcagaaacaagttgaagagaagggccagaaccaatgtgacaacagaagtcatttcttagtaacttttgctaaggatgaaacaattttctggcaagttaaaggaaatttagacaatgtgagttatgtttttttttttattttccttcaatgagaattttaaactaagttatttcagagaatgaagcaatgttgaccttgtctactaccctataaccagtgctcaacactggtcttgacagtttaagcacctaatatttgctaaataaataaccaaaagtagtaaacttgaactgatgagtgttagagcttgaaaataaagaaatgcaatatcttctatcaccatgaagtctctattgccaacagtgtaaccaacatgcacacttcagtctgaatgactcatgtgtttttagtttgtttaactgtgagatcactagtgaccccttaaaattttttggcttccgtaaatccctaaagagtcagtgcttgtagaaagagacattctggtggctcacagcattgtagtatggggaaacgctgtgaagtagtggagggcactaggaccacatttgaatcatgacttcaccatctaagtggcctgagatagtagccctaaatttcgttgagccttggtgttcttatctgcaaaatggaaaactaattccttataagactgttgtgagaattagataaaaccagttataggaagcatctagaatggcacctagcacagaacaagcattcagtcaatggtgtctattagtcctaattattaggaataataataatattagacaccattgatacccaagtctaataataatattcaccttactgagtattcagttgtacctctgctccttgacgtgggttgaagagagagagggcagaaatcgtgatggctgtacagttacatgcagtggaattcctttctttttgaccctcccaaactcctcttaacacctaatttcgccccaccaattgtagcacaagtctgagatacggagcagagagaagggccttgctcgttcttccaaaagaaacaacattaggttttattttaagagacacgaaggaaatttattaaacttgtcctcccagaggatctaataattttaatgagtgggcagacctcatcacataccttggatatcccaagatgtttcacagtcccatgagactaactgattaagttgcttttgctcattcccttaaagtcaatttccagataatatcctaactcatcacccacaactcgtctatgccctccatgtgactctgctccatagagttttatggcggaaataaccttagtgagggacttctggagtcccaagggagagtcagcaaaggcaggtgatttgtgcttattacgcagccagaccagatttgtctacatgttgaggaggaggtgggtacaccccaaagccattcaaaccttagagttagcaacaactgcagcctgcagcccactcaaagaaaagaaacctccaaaggccgtgaagacattgaactccctctgaagagaaagtggcttgtggatgctgtatgacaacaggcttaaggaaaggttccctacgcacagctcagaggaacatttctctgtagcctgacttgagtacctgttcagagggttggagagaaaatagtgaaaaaggaagatgaggtccctgctttcatgaaatacacattctagtcatgggagtgggttgaaagacaaaagtaaacacaaaattgaaaaaattaccagtgagttacaagggcgacataaataacacaagttgatggagtaaagcatcagtgggtgaccacctagttccactggtcagggatggcttcatggtggaagagctgatatttggaggggaaacacccagccatgagaagatctgaggcaagaaaactgcaggcaaagggaacagcttatgtaaaggttttacggcagggatgagtttacagtgtcaatgaagggcactagttcagggggtcaaagtacaggcagaatttggtgcagatcagtcagtagctaggggctagatcatgcaggattttgtgtatcatggtaacaggtatgactttccctttaaaaccttgtctcctagaggtggcctagggtagaaaaaagtggaaaatattagctcagaaggacaaaggcatgcatgagaagttaagaaggcaaaatgggctacataagcgagagccaatctaaaccccagtactaaagccaatccacgtgtatgcatttgagttaaaccctctgaaaaatcttcataaattaatctcattgctccagtggctctgacattatgacctgggttcccgcaggtactggttacaggggatttcctactcagaagtgttaaatgcgtttcccatccaaaggattaaataagtggttttgggtgcgtggtcagcagtgggttttggtacccactgttcttctttaactaactggggattcctggcgaagacctttgcatcctctggcatcagtctactcatctgtatactgaccagtgtttactaatgatcaccgttgtctctgctaacagtctgaggttgtataattcattgacatctggcataagttcatagggatgagttaaaaaaacacatttggcataatcatatacaagaccttataaatagctgagaaagccgcatgccagtcgccaaattgcgatggatgaaccaggtaaacacagtgccagaattaataacatcttgtctataatttattccaattttctatgtgaagggaaagctgtgttttcctctcttacacagccccccaaatccccaccaccccgcaggcaggcattttcatttacacaatgcgagacaattgcaaaatgaagagacaatgggtttgcccattctgttaattggcagcttgaaaaagtacaagataaatttggtgcctgaacgcatggagggaagtttctgagaagattgctgatggttaggcgccctctactggtagactcgacagaaaaccaccaaatgctgaaagattttttttacaattctgggatcctcgttcttcctgaaatgacctagaatgcaggtgtttgtcttcagggatttacaaatggaaaacaagctcaaaccaggccatacctcattgaagaaaactcttttcatgtctttacaaatcctggaaggtgtctgtgctcacttctattacaattttttaaagagtaccctgggctcagagatggcaaacactggttttagaagcttttcagatggaatgttcgcatccactaaaaatgaaatctttttagaatttaaggatattcatgtttaaaattacagactttgaggttatatggaacaaaaaaaggttagcaccaccatgataaaaatgggaaacatcttagagacccgagcaacatgctaatgtatagccacctattttttggccttgatctgagcctggcatgtggtggatgagggcataggatttacagttacacctggtttcgaaccctagttcttctacttactggagaagctacttaaagccactaactttcctttatataactctccgttaagtatttcaacacagcatatggattaagttcatgaaattcaatctccctccatcagcatcattgtacctattcaacatgaacacagaaaaaatgtaaaaatattagagtgaattgcagagtttatttattctctctgtgtttatggggtggcctctcataagaacactggattgggaacttgggaaaatgaattcgacatagatcctgccctcaaagagcaaaaacagtctagtagaaaagataagatgcatagacaaatagctgtgataagtcagaaaggttcaggaccgtgagagatagagtcaatgggaattctcaaaggagaaattatttctggttctgagaaatcaggaaaggcgttctttccagtattatgccattccaatgacttctgagctttccctagcatcaattcttgaccacgaggaaaaataaaaattagtagtttaataattgcattacatatttggggaagtattagtagtaatgataaaaaaacaaaaaaagttaagacaattacaaatttgcaaggggaaaaacattacataagacaaatatggccaggcgcggtgtaatcccagcactttgggaggccaaggccggcggatcacgaggtcaggagatggagaccatcctggctaacacagtgaaaccccgtctctactaaaaatacaaaaaattagccgggcatggtgtcaggcgcctgtagtcccagctactcgggaggctgaggcaggagaatggcgtgaatctgggaggcggagctggcagtgagccgagatcgagccgctgcactctggcctgggcgacagagcgagattccgtctcaaaaaaaaaaaagacaaatatatttatttacagtataccacgtggcttagtaatgaataatacttacactatcacaatattaataacataaggacaaacttctgaatttgccaataagcatgatttagctatactgagagtagagaaaggacaataagcgtatgtgagtatgtaaaagaattggatgttcactttcaattaaaaatttaataatgtctacaattatgatattaagaaatatagcagtgccaatatagtatttggtaatatggaggtttagactagaaacattggctaaaagatgaaagcagttgtcttagggggcagggtacagggaaggaataagacttgggactgctgattttcattatcactactgcaatgctgtaagtttttaaagcatgtatgtatgtatcattaaataaatttttaatgaacaagaacagaggatgatgtagtggacacgtttttttttttttatttgttcagttatttggtcgttggttgtttgattgttttttctgtccattttctccccgtgattattctaaaaatgcaaactcctttctcagcaaattttattcctccactttaaacacatggtttctatggagggttacattttttaagataagcttattccttggctacaatagattgatccagaattgggacagagagaggaagagagagagacaaaaacaggagagagagacagagagagaatgaaatgtcacataaatataggtaatgatgaagaagaactgtagcagtgttgaagtccctggttccgtttattcctgaggaccaacatcacccttgcctttccagtaacttggtttttaagttttacttcctatgggatacctcctacatccttcatacttttcttcacagttagtttgatattgtttgttcatttttttccgtaaagaacagtaaccacactcctactctaaaagggcatctgagcagcagcctctggtgcagtttctcaaagattctcgggagataccggagatggcagagtggacggttttaaaaggtggactttcctgtgactagcaggcaactgcatgcctgagtctgggaggaaaacttgagtgatgaggcaggtgaagatggattgagaaaaaccttcatctggtgagaaggagaccctgaagggagagggagatacaccatcagcaatccaggactgggctgggtgcagtggctcatgcctgtaatccgagcactctgggaggccaaggcgggcagatcgcctgaggtcaggagtttgagaccagcctggccaacatggtgaaaccctgtctccattaaaaatacaaaaattagccgggcatggtagtgcatacctgtagtcccaggtacttgggaagctgaagcaggaaaattgcttgaacccgggaggtgggggtaacagtgagctgagatcatgccactgcattccagcctgggtaaccgagtgagactttgtctcaaaagaaaaagaaaaagcaatccaggactggtgcaaaccagaactctgaggaccccaatggagagtacccaagaaacttcttttgagacaccaagagtgcagttgttcccttctctctctcttcactccacctcctgtctttctaaaatctatttggaggttaaatctccatgaacagtgggcgtacagtggtgacaagtggccatggtgcaatacatcctaagaggaagagcctggctaaggaaaggaaggacaaggacaccggagtgggcagagcacagatgggaccccaaagccaattctatttctccacaaggctggaagatcaggaggatcaggggaacggtggaggacaaagatgtcagacttgtagaatggagcttctatggatgaaaacctcctcgaattatcatttgaaaagttaaaaaaaaaaaaaaggagaagacagttgatgctgcaaaacaaattaaatccatgcttaaggatacagagggaaaggtctgaaaggaaatactaagaaaggaaataacagagatgaaagaccaggagtaaagatcaaggggagaaataaagcataagcaattatcaaagaaaaaatacaaatcaacccttcactggccaaggttaaaaaaaaaaatgatctctgtgtatggattgcaattcccatgctgtcttaggcaaaatagtatgaacatgttcatttaattttgtaatactgtttaaattaaaaggatcaatatacctaaaaaatacttcagcaaaaagaaagggctatgtagaggctgggcgcagtggctcacgcctgtaatcccagcactttgggaggccgatgcgggtggatcacgaggtcaggcgatcgagaccatcctggttaacatggtgaaaccccgtctctactaaaaatacaaaacattagccgggcgtggtggcgggcgcctatattcccagctactggggaggctgagggaggagaatggcgtgaacccaggaggcggagcttgcagtgagccaagatcgcgacactgcactccagcctgggtgacagagcgagactccgtctcaaaaaaaaaaaagaaagggttatgtagaaaaggaaaagcaaattagaggctatcttctaacttctcatctgcagtatcaatcccacaaggtagtggagcaacagtcacagtttggagcaaaaactgttgagatacaagtcgtcttttatcaatggaagtgataaaaaaaaagatgtaggtattaaacaagaactccaaaaaatccataggaaacaattatttaaagattatctccaactcactgagagatactaaaatattacaaactgaaaaatggagactttgcattaaatttgacaggattcagctctaaaactagataaacatgcttcatatttatcttgttctctccaggataaatgtaaatctagttgtaaaatgaatctaaaatcaaaacatctgctccttttaaaataatgtaaaattcatgattctatgaaaaaaatctgagtttaaaacgtcagctaatattaacaaagcctgagaaatgtggagagaggagagcgtggaggattgtgtactcaaaagatcctttccttcttgactctgagaattagtcaaggtgcagccagaggcttttgaaacattaaaagataaacatcaaagaaagtaaaagcaaagaaaacatggtttatagagcaaataggagtcacaaatgaaacagcataaaacaatatttaaaaagtataaaactatatgttagaacatgaaataggccttttgtggtagtcagagctgatgttaaacggctcttaaaaggcaaagacacttgagttgttttttttttttttttcaaaatttagccaattactgtccacaagagaacatctaaaacaaaggtgttcagaacgtgaagagaaaaatattagacaaagatacatcaatcaaaatcaaacaaaaggaaggagaagtacaagcaagaatatcaaacaccaacttcaagacaaaaatattgaagggagcaaaagttcacttcttttgatgagtggtacatacatgtatgaggtgaataaaacagcaaggcagatttaacaaaacctgaaaaatggtcatgcagtaatagttgaggatattaagatatatcactattcgtgataggtcaaacaagcaatgatgaagtgtgtatatagaaactacaaaatctactcaataagtagcatggatacctcttagaaatgagcaataaacctcaacattcaccatctatagaatacatttttttaaattgagcattttaggttacaaaaaaaatctcaaattaaaaaaccaaaaacgataaatgaacggtacagcctttcctatcgtccttttttcttaccagaataaaataaaactaaaaatgatcaaattattaagccacagaaataaaaaccttgaagtaaccttctaaataatttacacacaaaaataattcacactgcaattacaaaatataaataatataaattatctccttgagatttttaaaaacgcattcattctgatgtgcgtcttctgagcaaacattactggtgggaaatatatcaacgtgttaagagtaattagctttgggtagtgtttgttttctttggtgtaacaatttgtctatacacatgcattgatctttaaatggaacaggtacttgatagaggctgtatctttatgttttcaaagttagaaaactgtccttggggccattgcaagttctcacctcatttttaagatggaagatagaagttatctttagggaagacaaaccctcttgtggcatagctgtgaaacaaacatgtaaccaatgctgtctagaatcggtgaactaatttaaatgtagataatttcagattgagcaatattaactttcagttcaactatatgaactaggtaaaacatttttagggacaagattaacacagaattagagacttgctttctttaaattagatttaaattgctctgtgccttaaatatatagcttgttcttgagagagatatttatgtttatagccagacttttattggagagccacattacgactgggaggacaggctcctcttgctagagcaagatttctcagcctctgggctgggacacaggcagaaggatatgcccctgcttgtgcactttctctgggagtggagcagcatgggggaaatggtaattataagaactgaggaactgggtggctgaacaccactgaggctttgaagagagaaaatgagaggtttagggtgatcatcaaaaattcaaagtaaaatgtgaacaccagaggacctatttggcatcctttaaagaactgcttctctcttatatttggagggctggtcattctgagaaccaggctcacgatctatctgtaagagcaccagaacttgagaaaaggttgacgaatcagccccagcaagtctcctaaactaaagtctaggtctttatagggtgggatactgagactctggagaggacatctgggtgggcgccctggagagccttgaattgtctgggcctgtagaagtggactgctcctccttgttaaaggatagggcccccaaccactttgtttgagagccatgcagaagctttaagtgagacagtaaggaccactgtgctagaggatagacttgcagggattgaactgaatttgatgctggagtacctggattaacagtgttgctgagaggctgaccatgccacaccttatcaggacactgttgaagtttgggagtgagttttctatgctgtggaatgtagaccatatccagtgagtgaggaggaacatcttccctgaattaaactgaaatttagttagtagtagtagtgaaattcagttactactgtgattgtgactgagcagggtctcttcccaaatgctagggaatagttagaagtaggggtcagcagtagaggaaagtgactctccttaaagttgcaacacgttagggtcaacagcagcataagcagctacacagtagtagcaaaagaaggaagatagggacagttgcaggtgtgaaccattagccacggtacttgcaggggctgaggggtgggtttgctgggtagtaaggggaatgtggcataagtaccaatagcaactactacagtccactcctttagctctcagccctatgggtgcttctggcgctaagttctcccccatctggatacagcttctccatgatcctgcttggtcgtaaattctggggaaactgataagaacagcataaatcatacccctgctgctgtacttgatctcaactcaaggctttacttgattttatcgttttccttctctatacctgtttgtagttataattgggcatgagagtgcccagaggtaccccagtggatcacttccctgcctgccttgtttaatcagaattctacctcttcatgatgattaggctatagcccctcacaagacacatggtaactactttctttaattgctggtctattggcatgagaaacccaaagtgaccatgtggtaaatgcaatttaaagttcagcatgatgtttactgggtcctttgatggaagcacaggccttctgagaaccagaacttgagactcacactcaggggcaggaagcacaagttccttaagagggcctgttggaatgaaagtcataggaggctctcctaagtctactgcttggttcctggacccatgtgttcgctagaataatactgcttccaatagctatattggagacgcactccaaacatttttaaatctccattcttagagggtgtcatctcaaagctgaggcctcagctgcactttccaaaggacattctactgttctaccaggctggtagcttctacatggtataatatgtggtaagaccagcaaataccatgcccatgtgcccactgctgtgccactctttgccagtctcttggactgaggacgtactatgcaagattacatgttggaagatcaagccctccgtgagcctttggaataatggtactggcagagcgacttcaggcagaaaaggtaaactggtatccagaatacataccaattgtgattaagatgaattgctatttccagagaagaagggatccggtgtaactgaatggccaacagtagtagctggttggtcttactgatgtcatggtaaccatgtagttgctcaatttgatttcttttactggcaggttggatgttaaacagttgaagtccaacctggcaagtctcggtcttggtgagaggaagccagtgttgctagacagatgtatagcctctatttctactgtaatggcaaccccactcactactaaacaatggagtggtcagggaacgaggttggctgccattaactggttgcatcaacctttccagttgggtgttggtgcctcttcttcagtggatattctatgatgggcataaaatgcagtacaaggatgatcacacttgatgtccattcccacatgtccatctgcataactcttcctcagatctccttgtcttctcttccaatcttgcttttcccacttccttaaccaaccagctaagccatttgcattggtcctgagtccatatatattctaatctcaggtcaattctccctccatacaaagcagatggcaatgagcatgacctgaagctctgcccactgataagttttcttctcatttgtttttcacggccacctctaagtggggctagagtgaagcagttcatctccagttcatacaaacctaccgatctgagtccatttatgtattaagtacaggagattttctcctccgccttctgaacatagagaatgattcttgagatgaaaggtgtgagctgtgcgagaggcattgatataatagaggaaactgacatgaggtctgatgtctaggccacctgtactctctgaaccttgtccagctcaattcagaatataccactcctatcttgcagtggccgccccaattttatgacttgatgagtctgacagtctccagttcattatgtgcaattctgactccacggccatttgatgtcttatggtaattcatggtgtctctgtcagggctcagtagcagatgagtctgagcatgtgtgtgcacacatgcgtgtggttttaatagcatgtatgtctaagttgcagatagtattcttttgctcaagaacctaggaaatcataggaaaccttatgaattctctatagggacttgctagaaactccgtaaagcatcccaagtggcagggttgctcacagtgcaggctggacctgcctcagagcccttttttgctttaggtccccttaaaacatcagcattaccaaataaatgggtcagagtagtattctcaagagtgtagtatgctgtgtctaaaacccaaagaggccacctaagccctgtgctgctttctcagtggtaagaggtacatggtgcaatagcctgtcatttacattagaaaggatgacccattttgtgccagaatacagggtccataaatatttaactgatgcatcaggactctaaatatttttagaatttctctctctccttctagagtgcatgtgttttaccacttcttgcatatcggggccaacttacatgatgtcagcaatatgggtgaatgtggtcatctatagaatgtccagatggcccagatcctttcagacaatatagggacagagagaaagataattaacatatctctggggcaagaccatgaatgtatactgctattcatcccatatgaatgcaaattgcttctgtcttcctatttgatgagtattgaaaagaatgcatttgccagatcaatagcttcatgccacttgccagagtctctaataaagacaccattccagaacagcaggtgcaattggctgtactaattggttaagtttgcagtggcacactgttattctccatgatgaacctagtttttgcaggacgattgcccctgcatcctttaaatctttatctaccatttccccaaaaatataatgattactttacatttgctatcttggctggacatgaagggagtttcagttgcttgcactgaacctttcttattaaatagctctaagtgtataggtcaatgaaccagtgtaaggattttgccaacaacttaatgtgtccctttccattacgtattcaggaactgaggaaacgaccactgggtggtatctggatccagtggacattgtgagatagacctgggtcaggacttcatttattacatgactcccctgtacttttactctattggaggccagatggagttttgggtccctgtgcgtcagtgtcaacttgaactttgtatctacagccctcaaatggtatgggtattccatttttctcattgtgctgttacctgagtaaatgaccaatgttccctttagagaagaactgggggaatcaataccgtatgtatttaccatgtgtcccacccagttcactacaggtgagagtcttcttaactgagctgctacagcagccagggactatcactctgcacctaccaccagtgatgataacctcctttagcagaaggttcgaagtgatccaacttcagaatttcatccttaaagtcagcttcctaggactactcctggtaccaatggtctcagctcaggtttcccagaagtagactctgagatggagattcacatactcttaatatactgaatgctctttagaagaaaaaaaaatgttagtaagtgagggaagcaggctagagcagcagaaggaatcgagaagaatgtggtctcaagtcaagtctagtgctgatttagtccatgagaattccagagtgttttgcatatcacagttgtccagccttgaggcaagtgattggatttggtaggttattttctgaagaccactgatgtgaagaggaaatcttttcttttgcatacgacagaaggcaaatcttaccaaggagaaagtccttggtacagcccatgccttctgtacataggctgaaggggttaacagatgaagaccagaatcacaggcatcatgtcagccctttctagtgcagacaccaacaaagcccagcacagagtttgtggtgtcaagctgtgaataattcaattccactacttgctagctgtgtgaccttagacaaataatttaacttctctgagccttagtgtcatcctctgaaaagctatgtagtagaaacatacctatgtcatgtgattgctatgaaattttataatataacatgtgaagtgtttgccaataagctctcagtaagctagttgttttatcttcattcttatcataaattttcaagtcaatttggaagtgaaagatgttttctctaagaaggcaagaaaaaagaggccatagaaattaactcctttcttccataatcctttgtaaacaaggaacaattcctaaagaagatagacaaaggagatggatttgtggaatcagaatcatctagctcagctggtgacctctttttgactggctcattcctgggaaaaccaagattctaagactctcaaatccttctggaagcttggttacagaatcctgtagaaatgagtttctgagccctggctataaattttgattgactttacttttgcctaatgttcgagagaaagctagcttcatattctctgggacagcctatccagaagttcagtgaaaggggaaaattgctgttgattctcactccagtaagtcaagagctagaaagaaagtggatattgatatggtggagccagaaaatcattaggcaggaatccaggagacctaaggtctatatattccaactcagccgcatcaaggccatatgatctataaaatacattggcagaaggggagaggaatttgaagttagaagtacttgggattgaatcccagccccacaaattttcagctgcaactttacaaaagtatttaacttttctggtattcagtaaccgcatcttgaaaataaagaacatggaatgattttcaattttgactatacattagaatcaccaaggacatttttcagaaatgctggtgctaccctagaccagttgaatcagaatctctggggtggggcctggacatctgtatattttaattttccctcacgtgattctgcccagatgattcacatgcacggtgaaggttgagaaccactggttagatcatctctcagtgctgacattgatgtactccaacatggcaagtaatccaaacacctccattgcaggcttttaaatgtgcacttgtactgtgagctccatcccaaaaataaggtcaggaaaagttcacactctttagttttttttttttttaatgctttcaatggtatctttgcggcctgagtccacagttgagtgaaataaagaagtctttgcagctggtcgaagaacaggactactttgtcttggggtgaaggctgatgggaccagtggaattttcttataatcttagccatgtggtacttcatagaaagatgctttgttgagggttgggtgcggtggctcattcctgtagtcccagcgttttggaaggctgaggcaggggggttgcttgaggccaggagttcacttaacatagcaagaccccatctctacaaaaagtaataataataatgaaacaaaaaaattagaatggcttggtggcacatgcctgtagttttagctactctggaggccgaagtgggagaattgcttgagcccaagagttcaaagttatggtgagctataacagcaccactgcactccagcctgggtgacagatggaaacctagtcttaaaaaatgaagaagggaaagagagagagaaagagaaagaaagaaagagagaaagaaaagaaggaaagagagagagaaagaaagaaaagaaagaaaaaggcaggcagggggcgagagggagggagaggggagcgacggagggaaggagggaggaaggaaggaaaagaaaagtgctctgttggcatcagagtgggaaattcacttgaaatcagatttcagaatgataaccagtgactgcttgttttttatggtactggaattttttctttttttttttttctccctgatactgattttcctcaaaaccactcactgtcatttgtctgactggccttaaaaaaagccagagccatatgctgtttttgcatcttcctgacctcccatcagtccagtagtttggaccagttcctgggtaaaaagggaatctccaactctgcccaagaaaactggggttcagccagcccccttctgcttattgcctgtgaagtcagcgttctacctggcttagctaaagagatcagggtcttaagccaacaccactaactgacacagccaattaaggcaaagcatggcttaaaacagcagaattagaaatcttaatcgattcatcctctggaacatctgctttgggagaaaacaatatgagtactaaggctattttcactaacaaaataatctcaaattcttttctttttgtcaaaatataaagacttgacagcttaagaactccaatgctcctgaggggtcatagtttgtaggaaagccccaagatggcttatagtgccaatatttttacttggatccatcaacttgcctaaatgtcttggttttacatccaggttgctccatctgtactgacctggcttttctccaggcaaaaagtttcttacaaggggccagtaggcaggcaaagtgctttaggaagagaaagcttaagcagaacagaaagctaaaaatagcccaatttagttaatatttaacactttgtattttcatgaagcaggttgaaaatttaagctccaccgttggctaggaaagccaaaaatatttctttaatattttagtacctgaaaccacttagcagtaggggaaaggctgcctgttatgaaatgtgtttagtcatggaggacaaggccaaatttccactgttgggagaactagccaccccattggctgttcacagacacaagccaaaaccaccaggctcagaatgtagttgtgaagcctacggtagtaagaatgcctctttttcctttttcagtttcctaatctgattttcagtaaaggaacatcccagttcctacaggttgttcctcaatgatgcctggatctcacttcaggggccctgatggctgtgaatgggttttcaggagtccaaggaatggtgctcagctggcgtctctgggtccttgtcttgtggctacagggatctctatcacagcccacctctcccacttctggcacctgctccgcttcctccctaccttccacctcacacctaatccatgcctatgtgtacttggatacatgggtgcagctgaattacttagctcttaaaccctcccaagaggtgaactctaagccaaaaatcctgggactttcaaactcattctgcctcatcctgtcttccttcaacacatgttaatgaatttttaccagctgtggtacaataaataaataagtgagtaatgaatcaatctcttcctaaagcactttgcctgcctaccagtcattgcaagagactttttgcctggagaaaagccaggtcggtacagatggagcaacctggaggtaaaaccaatacatttaggcaacttgatggatccaaagaccaaagacggtctttgtctctggttcctggcacagagcgtccaaaacccctggaattttgtgagtaacagaagtataatttgtgatttgtaaaggggccccttttgaccatagccatgtttatgctaatgaggtaactcttggcagggtggagggtctaatagcttcaggatgggggttggtcaccagaaaaaaacaaccacgtggctagagggttaaaatatcagccccaccagctgggcatagtggctcacacctgtaatcccagcactttgggaggccaaggtgggtggatcacctgaggtcaggagttcaagaccagcctggccaacatgatgaaaccccatctctactaaaaatacacaaattagccaggcgtggtggtgggcgcctgtaatcccagctactcaggaggctgagacaggagaatcacttgaaccctggaggcggaggttgcagtaagctgagatcacaccactgtacttcagcttgggggagacagagcaagactccatctcaaaaaaaaaaaaaaaatatatatatatatatatacatatatgtctgtgtatgtcagccccaccttgggagagaggacaggggcaggagattgaagtcagccaccaagggccaatgatttcatcaatcgtgtctatgtaattaaaccttaataagaaactcagaatgaggaggtttgggagagctttttggttggtaacacatcaaagtgctgggaggattgtgagcccgggaagggcatggaagctctgcaccacctccctccccataccttgccctgtgcacctcttccatttcctgagctcatccttaataataaaccagtaacaggaaataactcccattcctgagttctgtgattgttgtagcaaattatggagcctggtgagagcagttgcagaaaactccaatttgtagtcagctagtgcagcagtacaggtagcctagggatgtcacttgtggctggcatctgaagtgggggccgtcttgtgggactgagcacttaacctgtgggtctgtactaattctgggtagcgtcagaatagaactgaatgccaggacaccccgctgatcagagaatcagagaattgattatggaagcacacatttaatggttaggaaaaaaacacacatcagctgaaaaggaattcctatctccgcctatggagtataaaggctaagacggtttccccactcactgcctctgaaggctgtgtcactgctgcatcaggggagggaaaaatagggttatcagcttaacaacacgagctgttttggccatctagggggaagcacacttaagattcgttactggaccaagacactgccttggagcacctactttgtgggaaatcagtgtgagtacccagtcactgccactctgccacattcttggctgtggtacaaagaaaaattatgtcttggaacatcatctggcatgttggggctgaggttcactgaggcttggttatgcctggagggccctggtgctgctttgatgctgtgattcattcattgatcttagtcagttccacagtttacatgctggtgtcaaagtctcacccagcataaccacagaggctttctgccttcatccataaaacaggctgggagatcaggtgagactttctggagttttgatacagggagacaaagatatgggagattcagggacttcattggtgtgattcatccatcagatgggtccgtttatccctcaaagaggatattggagcctggtgggcagggagttgtaggaaactcttaatttgtaatcagctgtggcagaaggagggtgtcattggcctggaatgccacagattctgtggcctacaaaagctgatcattctccacagttctgattcccagggacttacatgttcatagtatccttgcttctagcttctgctcccacacgttctgtgtagctctatacctccagacccagaactcagcctctgcttctttactggtggtgggagggaagtaaaagtgaagagaaaaatattttttaaaaatttttttctgaagtttattatgggaaggtattacattgacattgacattattcctcttccgtctgtttgatcctcctgttctctcttctccctccactgccatctctcttccatgctccttcctttccaattcaacctcagaggctatctgttgacattactatatgtaatctcaaagaaatattcagtgaaaggccgggtgcggtggctcacgcctgtaattccagcactttgggagattgagacgggtggatcatctgaggtcaggagttcgagactagcctcaccaacatgctgaaaccctgtctctactaaaaatacaaaaaattagctgagtgtggtggtgggcagctgtaatcccaggtacttgggaggctgaggcaggagaattgcttgaacctggg
